United States Patent Application Publication US 2012/0270216 A1 - sequence listing, part 2

SEQ ID NO: 53 - DNA, 4685848 bp, Salmonella enteritidis (residues 1,561,951-3,123,900 of 4,685,848)
tggcacaccatgataaacgcccacgacgcgataatgccgagcgaggcaaaattaagaacgatctcaaacacgcgggaggggaccaggtaattcaggaatacgccgaccacgtaaaccaccagagtcgccagtatacccgcatagggcacatgctgacggctcattttcgccatgaatttcggcgcggaaccccccatcgacattgaacgtaaaattctccccgtacagtaaagcccggagttcaggctggaaagcgcggcggttaacaccacgatattcataatactgccgatataaggcacgccaagtttagaaaagaaggtgacaaacggactttgccccgcctggtaggcgttccacggcagcagcaaaaccagcaatacgaccgatcctacatagaaaagaccaatacgccagatcacgctattgatggcttttggcaccatcgtctgtggatctttgcactccccagcggcggtaccgaccagttcaatcgacgcaaaagcgaacactacgccctgaatcagtaccagcgcgggcaacaggccgtgcgggaaaaagccgccattatctgtaatcaggtgaaaaccggtggcattaccctcaagcggttgaccggtaccgagaaaaatcgtgcctaccaccaggaagataacaatggcgagtacttttatcagcgcgaaccagaactccatttcggcaaaccattttacgccgatcatgttcatggtaccgacaatggttaacgcgccgagcgcgaacacccattgcggaacgtcgccaaatgcgccccagtagtgcatgtataacgccactgcggtgatatcgacgatcccggtcatcgcccagttaataaagtacatccagcctgcgacgtaggccgctttttcacccaaaaattcacgggcgtaggagacgaagctcccgctggaagggcgatgcaataccagttcgcccagcgcgcgtaaaatgaaaaaagaaaaaatgccgcatatcagatagaccagcgccagtgccggtccggccatttgcaatcgggcgcctgcacctaaaaataaaccggtgccaatcgcgccgccgatagcaatcatctgaacctgacgattccccatcgctttgtgatacccctcttcatgggcgttcagccagcgtcgtttcgccgcatgttgttctgcggcgtgcgtagtctgtgttttcattacgttacctgttatagcctgtcctgacagaaaaattccttatgccgcgacgggcgctcaccaatcgattgcctgcaatggcgaatgccgcttttccctgattctgtgacagggataaaaccgccggcggagcatcctacctgcaattgttaaatgacgcaaaacatacggaaagaagaaaatgaggatgtcgtgtttatttgtgcggtcagatgtggtgcggtgtggtcacgattcagccagataagctttcagcacaaatccgcagtgattgcgttgcgcaataattaatcagggttaatccctgcagggatttatggtcatagatatgacctcgaacgataaaccacctgacgatattgaagcagcataagatcaggccgttgcgcctgttattctcatttcctcctgaaaatgtatgcctttgagcaattttgttgattgacatatcgtcataatgagagaggagtaggacatataaagctattgagcaaaatttgaaggagcaggatatgccatatacatcagtttctacctatgccagagctttatcaggaaataagctacctcatgttgctgcaggagattatgaaaataaattatcaacaaaaatcatgaaaggcatcttgtatgtgcttaccgcaggactggcctacggatttacgcgagtaattgaacattattgcaatgttacgcctaaagttgatgagttctgtgccaatgcagggaatatccataatcaccttgctgatgctgtgtgtgatgggctgtatactatagatgtcgacctttctgatggtcggaggttaacattcgaacaactctcgctgatggctggacgtgagccaatcgtcaggatatcggatggcgaacataccgttgaggttaaggggtcctttgaagagatttgtatgagactggaagagggcttttttgaagcgccagcgtactatgattatgatattgatgaaaaatataaaaccgtcagagagcgaatggcagcatataatgccttacctcaggcattaggcgccattccgtgtttagaatattatatcgctcgggccagcaacatgcaggaggcgaaagcgcaatgggcggccgacataaaagctcgctaccataactatttggacaattattaaaaagcgtttatgtttagccagttttgttagaaatcagactcgctgagccggcgttaaaaattttaacacgccgctattttggcggcgtgtcgcaaagagattctcagaacccgatttccgtttgtacgccaaaattccacgtacctccggcgcgacagccggcctgtcttattttttcaaaagtatccaacgctattccacggatagggtatcctgttgcgcagcgatatccgcctcagcctgtgtgccgaacgcaagcattaatgttaatggaagcctcagatgacctcttttttacatgcttattttacgcgattacattgtcagccgttgggggttcctacggttgaagcgctcagaacgcttcacttagcgcacaactgcgcgattccttttgaaaatctggatgtgctactgcctcgtgaaatacagctcgatgagacggcattagaggagaaactgctttatgcccgacgcggtggatactgttttgaactgaatggtctgtttgaacgtgcgttacgcgacatcggttttaacgtccgaagcttattggggcgggtcattctgtctcatcccgccagtttaccgccgcgcacgcaccgtttgctgctggttgatgttgaggatgaacagtggatcgctgacgtggggtttggcggccaaacgctaaccgcgccgcttcgtctgcaggctgaaattgcccagcaaacgccgcatggcgaataccgcctgatgcaggagggaagcacatggattttacaattccgccaccatgagcactggcagtcgatgtactgttttgatctgggggtgcagcagcagagcgatcatgtgatgggcaatttctggtcggctcactggccgcaatcccattttcgtcatcatttgttgatgtgccgccatttgcctgatggcggcaagctgacattaacgaatttccacttcacgcgttaccaccagggacatgccgttgaacaggtcaatgtaccggatgtaccgtcgttgtatcagttacttcagcagcagtttggtctcggcgtaaatgatgtaaagcacggttttaccgaggcggagctggccgcggtaatggctgcatttgatacccatccggaggcgggaaaataattttttgccgcgaggatttgcgggcctgacaaagattaaaaagtaatggcccattcggcatgaaacagaatgaccgcctggccggagatggtgacgttttccggctggttatcgcgaatggtgacggtaacatcaacagtaccctctttgcctaaagcgcgcccctgatggccttgaatctgcagcgttttaccgtcatgcgccatcaggccatgatggacgagccatgcccccatcgggccattggcgtttcccgttaccggatcttccacaattcctatcgccggggaaaacattcgcccatcggtttcgttttttcccggacgaatctggaaaggaaaaaagccgttacagccaatttgctggctgattgccgtcagggctgccagattcggagaaagggcatcaatatcaacgtctggtttgagcaggatcatcacttttgcatgtcctgttgaagccacctgaattggcgctcccggcacgatatcatcttcagtcaggttcagtgcggtgataatggcagcccgaatctctccgactaacggtggttcaaaagagggctgaccttgttccagcgtgatgcgatagtcgttgtgttcggcatgaatttcaacgcgatgacggcccgctaacgaggtttgccagacggtggtgtttcccaaccccagtaccgttgcccgaacataatgcgcggccacggtggcatgaccacagatggggacttctactgtcggtgtaaagtagcgtatgcgcacatcactctcttcgctttttagcaaaaaggcggtttccgagtgacgaagttcacgggcaatcagctgcatctgcgcgtcgcttagcgtatccgcatgtaagacaacgccagcagagttgccgcgaaagggttcgctggtgaaggcgtcaacatggtaaatctgcggtttcattgatgttctcctttgactgaagaatcatcatagcctgtgcgttgccgaatgacgacgcccagacgtttttctttgcccggtaagcgtccccccgggcaaagagaattagcggcgggtacgaacaatctggtagcgacgggtgaaatactcaaacggcgcgctccagacatgaaccagacgggtgaacgggaagagcaggaaaatagtcattcccagcaccagatgaacgcggaaaacaaacgccacaccgctcagcatttccgaagacccgccgcggaaggtgacaatactttgcgcccagcccaccaacttcatcatttcgctgccatccggatattgcgccgaaaacggaatagtgctcaggccaagcaggcactgaatcagcaaaatgctcatgatgataatatctggtgtagtggatgtcgcccgcacacgctgattggtcagacgacgccacagtaatcccgcgccgccgatcaacgttaatacgccgcacacgccgccgaggatcatcgccatctgctgttttaccgcaatcggcaggaaccaggcatacatccagtgtggcgtcagcattccaaacagatggccaaaaaagatccccagaatgccaatatggaacagattcgaccatatcaccatcccacgcttatccagcatctggctggacgacgcgcgccaggtatattgtccgtagtcatagcgcagccaactgccgaggaagaagaccgtggcgcaaatataggggtagatatcgtaaaaaaagacgttcaggtactgtatcatttcgggcctcccgcgctgacgtcgacgtactgcggcgccgcgtcctggctaaagcgtcgttgataatggtgtaacggtgaactgtcacaggtcgtggcgttatcttcgataaacttcacctgttcttcttcccagacggcatccagtgcctgacgggtatcatcccgcgattcctgaacaatctgtttggtgacactgtcacttgtaagcgtactgcccgccagcgtcagcagggcgtcaaacagttgataccacggcgctcctcgctgtttcagacgaccgcccagtagcgccagaataggggcaatattctgtaatccctcgcgcgcttccgcttccggcaacacgcttaagtattccagatagagcggcaggtgatccggcagttcgcggcagttgagctgcaggcccacggtttcatactggcttaacaaatcgaccatcgcctggccgcgatcgcgggactccgcatgaacatgctcgaataacagcaatgaagtggcgcgcccgcggtcaaacacttcacaccattctgcttgtttatccagtaacggcgcataaagcagctcgcgagtgaagtcggccagcattggcgcatcgtgttggataagggcaagcgcttcatcccgacattcccacaactcgtcgtccggatactccatcaacaggccaatcgctttgaggatttgcattattccccctccgctttatcacgtacttcggtgatattgatggcatcaatacggctactgttgaacaggttgaatttggtatccgacccgtggcaaccgtcgccaaaagtaaagccgcagccgttgcgctccggaaaggcatcgcgcgccatttcccggtggctggtgggaatgacaaaacgatcttcataattggcaatcgccaggtagcgatacatctcttcaacctgttgtacgctcagaccgacttcgtcaatcgcgcgggtatccgtcacgccttcaaccgtctgcgagcgcatgtagtggcgcatcgccatcatccgctttagagcccgaatgaccggaccggtatcgcccgcgctgagcatattggccaggtactggaccggaatacgcagcgtctccaccgccggcagaatattgccattgtgcggtaacccgcccgcgtcggcgtatgactggatgggcgacagcggcggtacgtaccagaccatcggcagggtacggtattccgggtgcagcggaagcgccagcttccagtccatcgccattttgtacaccggcgaccgttgggcagcgtcgatgacgttttgcgggatgccctgtttaagcgcctcttcgatgaccgccggatcgtgcggattgagaaacacatcacactgacgttcatacaaatccgtctcgtgttcggtactggccgcttcttcaatcctgtcggcgtcgtagagcagaacgccaagataacggatgcgcccgacgcaggtttccgagcaaacggtcggctggccggattcaatacgcggatagcaaaatatgcatttctcagacttgccgctcttccagttaaagtagatttttttgtacgggcagccgctgatacacaaacgccagccccggcatttatcctggtcgattagcacgatgccgtcttcttcacgcttataaatagcgccacttgggcaggtggcgacacaactggggttgaggcagtgttcgcacaggcgcggcaggtacatcatgaaggtgttttcgaactgaccgtacatctccttttgtatgttgtcgaagttgcggtcgcgggcgcgtttttcaaactcgccgccgagcagctcttcccagtttggcccccagatcaccttgtccatccgttttccgtcgatcagtgaacgaggacgggcagtgggctgatgcttactctccggcgcattatgtaaatgctgataatcgaaggtaaagggttcatagtaatcatcgatttgcggaatcaccgggttggcgaaaattttgctaattacccccattttgccgcccagacggggccttatcttgccattaacatcacgaacccaaccgccttgccactcctgctggtcttcccagtttttgggatagccgatacccggtttagtttcgacgttattgaaccatgcgtattccatcccttcacgtccggtccagacgtttttacaggtgacggagcaggtgtgacagccaatacatttatcaagattcagtaccatcccaacctgtgagcgtattttcattttttcgcctcctgtacctgatcccggccctcatcatccagccagttaatgtttttcatcttcctgatcatgatgaattcatcgcgattcgaacccacggttccgtaatagttgaagccgtaagccagttgcgcatagccgccgatcatatgcgtcggttttggacagacccgggtcacggagttatggatcccgccgcgcatcccggtcacttccgaacccggaatgttcataatccgctcctgggcgtggtacatcatggtcatacccggcgggacgcgctggctgaccaccgcacgagcggtaagggcgccattagcgttgaaggcttcaatccagtcgttatcttcaatacccaattcacgggcatcggcttcgctgatccagacaatcggcccgccgcgcgacaaggtcagcatcagcaggttttcgctgtaggtggagtgaattccccatttctggtgcggcgtcaggaagttaagcgctttttccgggaaaccgttgggcggaatttctcgcatttcgctgacgctgcgggtatcaatcggcggacgatatgccaccaggctttcgccaaaagcgcgcatccacgcatgatcctgatagagttgttgacgccccgacaacgtgcgccacgggatcagttcatgtacgttggtatagccggcgttataagagacatgctcgctttccagccctgaccaggtcgggctggagataattttgcgcggttgcgcctggatatcacgaaagcgaattttctcatcttctttattgatggccagatgggtgtgctcgcgcccggtcatctcgcccaacgcctgccaggctttcaccgccacctggccgttagtttccggcgctaaggcaagaatcacttccgaagcatccagcgcggtgtcgatccgcggacgtcctttcgccgggccatcgtgtttggtgtaattgagcttaccgaggaaatcgacttcatcttgcgtattccaggcaatacccttaccgccgttgcctaatttatccagcaggggacccagcgaggtaaaacgttcataggtggccggataatcgcgttcaaccacgacgatattgggggcggttttgcccggaataagttcgcactcgcctttacgccagtcgagaatatcaaatggctgcgccagttccgccggggaatcatgctggagcgggtgtaacaccacatcggtttcctgtccgagatgtccgacacacacttcagaaaagacgctggcgatacctttgtagatctcccagtcgcttttggattcccaggcaggatcgaccgcggcggaaagggggtggataaacggatgcatatccgaggtattcatatcgtctttttcataccaggtggcggtcggcaaaacgatatcggaaaacagacaggtactggacatacggaaatcaagcgtgaccaacagatcgagcttgccctcaatcgcggcggactgccattccacctcttcaggcttaattccttcgctggaacccagcgcttcgccctgaataccgctgtcggtgcccagcagatatttgagcatgtactcatgacctttcccggaggagccgagcaggttagagcgccagacaaataaatttcgcgggtgattatgaccactgtcaggctgttcgcaggcaaaacggatagcgcctgatttcaacgcctgcacggtataatccgccgcagacagcccggctttatcggcgctcgctttcacgctgagcgggttaagattaagctgcggcgccgagggtagccagcccatacgttccgcgcgcacgttgaaatcgatcaggtgtccggaaaatttagccggatcggccagcggcgacagcaactcttgcgcagtcagtttttcatagcgccactggctggcatggttgtagaaaaacgaggtactgttcatctgacgtggcgggcgattccagtccagcgcgaaggccagcggcagccagccggtttgcggccgcagcttctcctggccgacatagtgcgcccagccgccgccggtttgtccaacacagccgcagaacaccagcatgttaatcatcccacggtaattcatatccatgtgataccagtgattcactcccgcgccgaggatgatcatcgaacgaccgtgagttttatgggcggtctcggcaaattcacgtgcaatagtttcgatatgtcgacgcggcacgccggtaatctgttcgccccaggccggcgtgtaggcttttacgtcgttataattattggcgctatggccgtcatccagaccacgatccagcccataattagccagcaccagatcgtaaacgctgacgaccatccgctcgctaccgtccgccagagccaggcgtttcaccggtaactgacgtaccagcaccggttcctgccgcacgctgcgaaaatgcgggttttcgttaccgccaaaataggggaaggcgacacccgccacgtcatcatgctgaccgagtaaagagagcgacagttcagtttcgacgcccgccgccaccggttccaggttccattttcccttttcgccccagcgaaaaccgatagaaccattgggcgcgaccagttcgcccgtactgttgagcgcgacggttttccattccggattattggcttctcccagtccatccaccagatccgacgcgcgcatcatacgccccggcacataactgccgtctgcgcgctcatccaacagaaccagcattggcatgtcggtataacggcggcaatagttaagaaaatagtcgctgggattatcgagatgaaactcttttaaaataacgtgacccatggccatcgccagcgcgctgtcggtaccttgctttggcgccagccactgatcgcacagtttagcgacttcggaatagtccggggtgatggcgatcgtcttggtgcctttgtagcgcacttcggtaaagaagtgggcgtccggggtacgcgtctgcggcacgttagagccccaggcaataatgtaggctgagttataccagtcggcggactccggcacgtcagtctgctcgccccaggtcattggcgacgcgggtggaagatcgcaataccagtcatagaagctcagacaagtaccgccaagcaatgacagataacgtgttccggcggcgtaagaaaccatcgacattgccggaataggtgaaaaccccgccacacgatccggaccataggttttgattgtccagacgttagcagcggcaatgagctgattcagctctttccagttcgaacgaataaagccgccatgtccgcgcacctgtttgtaactttggcatttttgcgggtcgttcattatagattcccatgccagtaccggatcgctgtgccgggaaagggcctcgcgccacagttctatcagccgcttacgcaccagagggtatttcaaacgattggcgctatagagataccatgagtagctggcgccgcgcgggcagccgcgcggttcatggttcggtaaatcgggacgcgtgcgcgggtagtcggtttgctgggtttcccacgtcaccagaccatttttgacataaattttccaactacaggagcccgtgcagttgacgccgtgggttgagcgcacgatcttatcaaactgccagcgctggcgataactgtcttcccagtcgcggttggtatgcatcacctgagcatggccgtcggcaaaggtatcgcctttttgtttaaagtaacgaaagcgatccaacagtttactcatgacatttctcctgcttcgataaattttccgccatcctgtcgatttggcgttaaaccattaccggatggccgtcctacaggtgcgtatgttgttattgttgtttaggcttacgacgcccgtagaccagccaggtcagcaggacgcaagcgatgtaaaacagcaaaaagattttcatggcgcccaccggcgagccggtcaaggccaaagaggtgccaaacgcttttggaataaagaagccgcccacagcgccaatagcggagataaaaccgagcgcggcggcggtatccgtcaccgcttcgcgctgcgcctgctcatcgctcccgccgcgcagtttgacgttgtagagcgtgatctgacggaagatcaccgcaatcatctggaaggtagaaccgctgccgagacccgctgtcaaaaacaggcccataaaaacaagatagaacgcgctaaagctgcctgcgccggagcctggcagtgtgaggaatagcaaggcggtaaacagcgccataaagataaaattaatgagcgtgacgcgaacgccgccgaatttatcggagatcacgccgcctgccgatcgcgccagcgcgccgataaaggggccaaagaacgccagttgcagaatgtttacgtcgggaaattgcgttttggcgagcatggcgaaacctgcggaaaagccgatgaatgacccgaatgtcgccaggtacaacaggctaagcagccacaggtgcagacgttttagcaccggcaattgcgaggcgacagacgcttttgaactgccgatatcgttcataccaaaccaggcggcaagcgtcgcgacagccagtaacggcacccagatccaggctgcgttagtgagggcgagcagggagccatcaggttgcggcacgccccggacgcctaaaaaagtaaatatcggcagaaaaataaccagcggcgcaatcaactgcatcacactgacgccaagatttcccagtccgccgttaatacccaacgcgctaccttgtctggcttttggaaagaaaaaactgatgttgcccatactggacgcgaagtttgcccccgcaaaaccgcacaacagagcgatgagcataaataccccgaaaggggtggcaggattttgcacggcgaatcccagccaggtgcagggaataatcaatattacggtacttaatacggtccatttacggccaccaaacagtggtaccataaaggagtagggaacgcgtaatattgcgccggaaagagaaggtagtgcggttaataaaaagagttggtcggtggtaaaattaaatccaattttattgaggttgacggcaacagcgctaaacaacatccagacgcaaaatgcaaggagcaaacaacttactgaaatcaataagtttcttctggcgatgcctttccctttattctcccagaaggctggattttcgggtcgccagtcactcaagagataacggttataattctcgttttgtcgtgtcattttacccctcacatgcgcatatcatttgaagaaaaacacaaaaaagagacagagcgtcacgcgctcttttgagaacttattgaagtttttttagaatattgagtgaaagaatagataaaaaaccaggccagcgcggcgcgatgaggagatatgatgtttcttaattgttactatttgtaaattaaaagcgatttttattaaattatttgtaactttacgcaaagagttcaagcgtaatcatacgatccagatggaatttaaacgcgggatcggccatttccggaatccccagtacatacataccgtccagcccgcacaccagtgcgataagccgccaggcgatatccgtggcgttagcagtaaacgtaaattctcctgcctgtttgccctgctcgataattgtgaccgtttcctcatgccacatctgcatcgtgaggagataagcatctctgatgtgcggatcccggtcggccagaatttgcgcctctcgccacaattttatgtaaggctcaaagccgccgtcttcgctacccaacatagcgtgaagccgtgcacgccaggtggcgggcggcggaacttgcccggcatcaagcagggtgcggatcaaatggacaaaggccagcgctttgagctcgcccgccgagctgaagtggtgatgcacctggccggcggcgacatcggcttctgatgcaattcgtcgcaccgtcatggcggcaaacccgtctgccagcgccacgcgcatcgccgcttgcaggatcacttcgcggcgttcatcccggttaaggtaactcatattttccccacattagccaatgcgcgcagtgtaacaaaaagctggacattcgttcaacttaccgtaggatcctgaagctggacaagcgtccaaatttgagtttttgaagggagagttatgtttcgtcagtggttaacgttagtcattattgtgctggtctatattcctgtcgccattgatgccacggtcttgcatgtcgccgccccgacactgagtatgacactgggggccagcggcaacgagctgctgtggatcattgatatttattctttggtcatggctggcatggtgttgccgatgggcgcgcttggcgatcgtatcggttttaaacgcctgctgatgctgggcgggacgctctttggcctggcgtcattggcggcagcgttttcgcataccgccagttggcttatcgccaccagggtattactggctattggcgcggcgatgattgtaccggcgacgctggccggaatacgcgctaccttttgtgaagagaagcatcgcaacatggcgctgggcgtctgggcagcggtaggttcgggcggagcggcgtttgggccgctcatcggcggcatattattagagcatttttactggggatcggttttcctgatcaacgtgccgattgtgctggtcgtcatgggcttaaccgcccgctatgttcctcgccaggcgggccgtcgcgatcaaccgctcaatcttggccatgcggtgatgctgattattgccattttgctgttggtctatagcgctaaaaccgcgctgaaagggaatttgtcgctgtgggccatctcgcttaccctgcttaccggcacgctgctcctgggactctttctccgcacacagcttgcgacatcgcgtccgatgattgatatgcgactatttacccatcgcattatcctgagcggcgtcgtgatggcgatgaccgcgatgatcactctggtgggttttgagctgctgatggcgcaagagctacagtttgttcacgggctatcgccttatgaggccggggtatttatgctgccggtgatggtcgccagtggattcagcgggccgattgcgggcgcgctggtctcgcgtctggggttacggctggtcgcgacgggcggcatggcgttaagcgcgctgagtttttatggcctggcgatgacggatttcagcacccaacaatggcaggcctgggggctgatggcgctgctgggatttagcgccgccagcgcattgctggcttccacgtcggcaattatggccgctgcgccggcagaaaaagcggcggcggccggcgcgatagaaacgatggcttatgaactgggcgcgggactgggcattgccattttcggtctgttgttaagccgtagcttctccgcgtctatccgtctgcctgccgggcttgaggcgcaagagattgccagagcgtcatcttcaatgggagaagccgtgcagttggcgaatagcctaccgcccacgcaggggcaggcaatactggacgccgccagacatgcctttatctggtcgcatagcgtggcgttaagcagcgccgggagtatgcttcttttgctggcggtagggatgtggttcagcctggcaaaagcccaacgccgataacataacgcctggtgagataagcgcttaatgcgctagctggcagggggagtccatttcctcaacctctttaccgctgaggcgtgcgtattgccccgtcagtcgccagaaggcaggctgggtttcggtataaatttccgcagccagaatcagccgacggcgatcaacttcgttcagttccagtaaggtccagggaataaaatagcgatcggtatcggtaagccgaaaccacagcggacacccgcagccggaacagaagtagcgttcgccgcgcgaagaggatgaaaagtatggcggttccggggaaaggggggctagctgtggttgcccgcaggcttccagatacatggctattccacccgaccatttttgacacagcgtacaatggcaggcatagacatccagcatttcgacgtcaacggtaaaatggctctgtccgcaaagacaacgaccagtgaacgtctgcacggcatactccttatgaccgagtctacatcaagagaaaaagccagccctgaaaggactggctttgtattcagactacaacaaaattagaactggtagttcagaccaacagcaacgatgttgtcggtagacactttagccgctttggtgaagtcgctgtcgtccagcaggttgattttgtaatcaacgaaggtggacatgtttttgttgaagtagtaggtagcaccgacatcgatgtactcaaccagatcctggtcgccgtaagtacccaggtttttacctttggatttcaggtaagcgatggacggacgcagaccgaagtcgaactgatactgagcaactgcttcaaagttctgggttttattcgcgataaacgcatcacccgctgaatcttcaccaaaggtggtcatgttcagcgtttcggagtaggtggtcgccaggtagatgttgttcgcatcatatttcagaccagcagcccagacttcagcgtttttacccgcagcattcaggttgctcgctgctttcacctggttgttagtacggtcagacttcgcataggccgcacctacgccaaaaccttcgtactcatacgttgcggacagaccgaaaccgtcgccgttagactcgtacgcgccgtcacggtcgtttttgccctggtactgcgcggcaaagttcagaccttcaaccaggccaaagaagtcagtgttacggtaggtggcaacaccagtagtacggccagtcatgaagacgtcagtctgagtccaggtatcgccaccgaactctggcagaacgtcggtccatgcgccgatgtcgtaagcaacgccgtagttacgaccgtagtcgaaagaaccgtagtcagcgaatttcagaccagcaaacgccagacgggttttgtctttgtcagcgccctggctttcagtacggttgcctttgaattcatattcccactggccaaaaccggttaactgatcgttgatctgagtttcgcctttaaagcccagacgcgcgtaagttttgtcaccatcacttccgttatcatcagagaaataatgctgagcgtgaactttaccgtacagatccagtttattgccgtctttgttatatacctcggctgcatttacaacgcctgctgccaacagggaagtcactgccactgccactaacttaagtttcattttaataatccttataattttcttagcgtgtttcctcaaccattgttaaacgaggcgtttgtcaatggcagactatttttaaatgacggagtggcataagttcaataataagtttcataagattacaaattattttaatttgtgtgatcgagatctccttaatacatttgagagtattaattcaaatagggactgtctaataagatatattttcggaggggactattgggctgtttatggttttatttttggtagtaactactgattattatatgcactaataacagttgcgagctaacgttaattatatatttgttaatataattatatcattgcattaacatgtttaacgattttataaaattcatttttaccagcgcaatcctggtatggcgcaggaggagcacgtgaaaatggaaaatcgtcaaatacgcacaggcaatagataaaagcgtagttgtgttatgaagagtgtcaaggtacagcgggtcgatttaatatcaatatcggcccgcccgtcgcttagcgccgccgcgttgccagccaacaaagtagcgaacctacgcaaaccatgactgcgccttgccagaaggagaatgacagtggtgagctgagtaacagcgcggccagagcagaggacatgacgggggtaaaataagaccctacggccatgatagtcacattgccatgaagtatgcccacattccatgcggcgtaggcaaaccctaacgttaatgccgcggtaaaaagtttagcaatcaccggtaggctaaatatcatggcaggttgcggcgtaagaaaatagtggaaccacagcgccacggcggtgagtaacacaaagactgtgataccgttaaaaccacgcgcatatttatttgtgacggtgcagtacgtcgcccatataaacgccccaagaaatgccagtaaataacttagcggactggtggcgacattgctgataatttctcctggattaagaccattctcgccccccagaacccagcaaacgccagtaagtgcaataagcaatccaggaacaataagccagttagttttttgcccattaaaaagaatggcaaacagaatggtcaggctgggccataaatagttaaccatgccgacttcgatagcctgatggcgagtggcggcataaccgagagaaagcgccaggcatatttcataactgacaaacagtacgctgcctgcgatgaggtatcgccccgggaaacggcggatatcaggtaatccgacggtaaaaatcagcagcagaccgcttaatgaatagatcatggctgcgccgcctaccggtccgagaccttcgctgacgccgcgaattaacccaaccatcgtgctccacagaacgatggcaacaagccctattagcgttgctttttgtgatgtcatgctttgtgactgtcctgaataccgcgcaaaataaactgccacttatagcactttttccgagggcgatgccatgcagtgtcattttttagtacctccctggagttattgcggtttaaaaatagggctatttaatagcggaaccgtttcaatattgatttgacgcaaaaaagttatcgattttgctgttagtttcctcgcgaagttatacacgcatcctgggctgaggttttgctgcagttcgaaggaggcgtgcatccgtggaaaaaagaggaaagcaatggacgtcagccgcagacaattttttaaaatctgcgcgggcggtatggcgggaacaacggtggccgcactgggttttacccctaaaatggccctggctcaggcgcgaaactataagctgttgcgcgcaaaagagatccgtaactcctgcacatactgttccgtaggttgcgggctattaatgtatagcctgggagatggggcaaaaaacgcgaaagaagcgatttaccatattgaaggcgacccggatcatccggtaagccgtggcgcgctgtgcccgaaaggggccggtttgctggactatgttcacagtgaagatcgcctacgctatccggaataccgcgcgccgggttccgacaagtggcagcgcattagctgggatgacgctttcactcgtattgctaaattaatgaaagccgaccgcgacgccaactttattgaaaagaatgagcagggcgtcacggttaaccgctggctctctaccgggatgctgtgcgcctcggcggccagcaatgaaacgggtatgctgacgcagaagtttgcgcgttctctcggtatgctggcggtagataaccaggcgcgcgtctgacacggaccaacggtagcaagtcttgctccaacatttggtcgcggtgcgatgaccaaccactgggtggatattaaaaacgccaacgtcgtgatggtgatgggcggcaatgccgcagaagcgcatccggtgggtttccgctgggcgatggaagcgaaaaataataacgatgcgacgctgattgtcgttgatccacgctttacgcgtacggcgtcggtggcggatatctatgcgccaatacgttccggtacagacattacctttctgtccggcgttttgctgtacctgatcgaaaataacaaaatcaacgctgaatacgttaagcattacaccaacgccagcctgctggtgcgggatgattttgcctttgatgacggtcttttcagcggctatgacgcccaaaagcgtcagtacgataaatcctcctggaactaccagttcgatgaaaacggctatgccaaacgtgatgaaacgttgacgcacccacgctgtgtgtggaatctgctgaagcagcacgtttcgcgctacacgccggacgtcgtggaaaacatctgcggtacgccgaaagcggatttcctgaaggtgtgtgaggtgttggcctctaccagcgcgccggatcgcactaccaccttcctgtatgcgctgggctggacgcaacataccgtcggggcgcagaacatccgtactatggcgatgatccagttgctgctcggcaatatggggatggctggcggcggtgtgaacgccttgcgcggccactctaatattcagggtttaacggatttaggactgctctccaccagcctgccgggttacctgacgctaccgtcagaaaaacaggccgatctgcaaacttatctggcagcgaatacccccaaagcgacgctggccgatcaggtcaactactggggtaattatcctaagttcttcgtcagcctgatgaaatctttctatggcgatgcggcgcagaaagagaatgactggggctttgcctggctgcctaagtgggatcagtcctatgacgtgatcaaatatttcaacatgatggatagcgggaaagtcaccggctatttctgtcagggctttaacccggtggcgtccttcccggacaaaaacaaagtggtgcaaagcttaagcaaactgaagtatctggtcgttatcgatccgctggtgactgaaacgtcaacgttctggcagaaccacggcgaatctaatgatgtcgatccgacaacgattcagaccgaagtcttccgtctgccgtctacctgttttgcggaagaggatggatctatcgctaactccggtcgctggttacagtggcactggaaaggtcaggacgcgccgggcgaagcgcgtaacgacggcgagattctggccggtatttaccatcgtctgcgtgaaatgtatcgcgcagaaggcggtaaaggcgccgaaccactattgaagatgagctggaattacaagcagccggatgaaccgcattcggaagaagtggcgaaagagaacaacggctatgcgctggaagatctctatgacgccaacggtacactgcttgccaggaaaggccagttgttgagtagttttgcattactgcgcgatgacggtacgacatcctcctcctgctggatttataccggtagctggacggagcagggcaaccagatgtccagacgtgataacgccgacccgtcagggcttggcaatacactgggttgggcgtgggcgtggccgctaaaccgtcgcgtattgtataaccgcgcttcggcggatccgcagggtaaaccgtgggatccaaaacggatgctgatccagtggaacggcgcgaagtggacagggaacgatattccggactttaacaacgcggcgccggggagcgggaccaatccgtttatcatgcagccggaagggctgggacgtctgtttgctattgataaaatggcggaagggccgttccctgagcattacgagccgatggaaacgccgctgggcactaacccgctgcacccgaatgtggtctcgaacccggctgcgcgtctgtatgaagaagatgcgctgcgcatgggtaagaaggagcagtttccgtacgtgggcacgacttaccgcctcacagagcatttccatacctggaccaaacatgcgctacttaacgctatcgctcagccggaacagtttgtggagatcagtgagacgctggcggcagcgaaaggtattgctaacggcgactatgtgaaggtgagcagtaaacgcgggtttattcgcgcggtcgcggtggtaactcgtcgtcttcgcaccctgcatgtcaacggtcagcaggttgaaacggtggggatcccgattcactggggctttgagggtgtcgcgcgcaaaggctatatcgccaatactctgacgccaaatgtcggtgatgccaactcgcaaacgccggaatacaaagcgtttttagttaacatcgagaaggcgtaagggaggcgaacatatgtctatggaaacgcaggacattattaaacggtccgcaacaaacgccatcacgccgcctccgcaggcgcgtgattacaaagccgaagtcgcgaaactgatcgacgtctcctcctgtgtcggctgtaaagcctgccaggtagcctgttctgaatggaacgatattcgcgataacgttggtcattgtgtcggggtgtacgataaccctgccgatctcagcgccaagtcctggacggtgatgcgctttaccgaaaccgagcagaacggcaagctggagtggctgattcgtaaagatggttgtatgcactgtgaagatccaggctgtcttaaagcctgtccatctgccggggctatcatccagtacgcgaacgggattgttgactttcaatctgaacactgtatcggctgtggttactgtatcgccgggtgtccgtttaatattccgcgcctcaacaaagaggacaaccgcgtttataaatgtacgctctgcgtcgatcgcgtcagcgtgggccaggaaccggcctgcgtcaaaacttgtccgaccggggctattcacttcggcaccaaaaaagagatgctggaactgggcgagcaacgcgtggagaagttaaaagcgcgtggctttgaacatgccggtatctacaacccgcagggcgtcggcggcacgcacgtcatgtatgtgctgcaccatgccaatcagccggagttgtaccacggcttgccgaaagatccgcagatcgatacctcaatcaatctgtggaaaggggcgctaaaaccgctggccgcagcgggctttatcgccactttcgccggtctgatttaccactacatcggtattggcccgaataaagaaacggacgacgatgaggaggatcatcatgagtaagtcgaaaatgattgtgcgcacgaaatttgtcgaccgcgcctgtcactggacggtggtgatctgcttcttcctggtagcgctgtcgggaatttcgtttttcttcccgacgctacaatggttgacgcaaactttcggcacgccgcagatgggacgtattttgcacccgttcttcggtattgccatcttcatcgcgctgatgtttatgttcgtgcgtttcgtccaccacaacatcccggataaaaaagatattccgtggctgaaaaatattgtcgaagtattgaaaggcaatgagcataaggtggcggatgtcggcaaatacaatgccggacagaagatgatgttctggtccattatgagcatgatttttgtgctgctggtgactggcgtgattatctggcgtccgtatttcgcgcagtatttccccatgcaggtggtgcgttatagcctgttaattcatgcggcggcgggcattattttaatgcacgcgatcctcatccatatgtatatggcattttgggtgaaaggctcgattaaaggcatgatcgaagggaaggtcagccgtcgctgggcgaagaaacatcatccacgctggtatcgtgaaatcgagaaggcggaagcaaaaaaagagagcgaagaaggtattcagtaattctttcgcaatctgataaacaaggcgctatcctggtagcgccttgttttcatctgctgtctgtatactcagacgaccacagcaaatcgtttaacgacggaaatcgatgaccatacggccacgaatttgcccttgttccatctctttaaaaataacgttgatatcttcaagcggacgtaaagcgacttttggcacgacttttccttccgccgcgaactggaaggcttcggtcagatcctggcgtgtccccaccaacgaaccgacaacctgaatgccatccagcaccaggcgagggatatcaaggttcatggcttctggcggcagcccgactgccaccacgcgacctccggcgcgaacggcatctactgcggaattaaacgccgccttagcgaccgcggtaaccaccgctgcgtgcgcgccaccggttttttcctgcacaattttagccgcatcttccgtacgtgaattaatggtcagatctgcgcccatttcctcggccagtttcagttgtccatcattgacatcaatggcgatcactttcgcattgaaaacgtttttcgcgtactgcaaggccagattacccagaccgcccagaccgtagatggcaatccactggccaggtttaatatgagaaatcttcaccgctttatacgtggtaacgcccgcgcaggtaatactacttgccgccgcagagtccagaccttccggtactttcaccgcataatccgcgacgacaatacactcttcggccatgccgccatctaccgtgtaaccggcatttttcacgttgcggcataaggtttcattgcccgtattgcaatactcacagtgtccgcatccttcataaaaccacgcgacactcgcgcgatcgccgggtttcagcgaggtgacaccaggaccgacttccgccacgacgccaatgccttcgtgtcccagaatgacgccggttttgtcaccgaaatcgccgtttttcacgtgtagatcggtatggcatacgccgcagcactccatttttagcaaagcttcaccgtggcgaaggggacgcagcgttttctcagtaacatcaacctgatgatcttgtgtgacaacagcagctttcataaccttctccttttattaatagtgaactgcatagcaggtaatagcaggtaaggtgctattacctctttaggattaatatttctgatgagttatgcaaggcggcagaaatacaatgtaatagtttagccaggattatcctgataaatccccgttcaatacataaaggtggctaatattagtagcttgacaaataagcagggaaaggaattcaggtgtgtcgacagactcactaaaactaaagaagaaaatgatatccggcggcattcaccgccgggtacgtattaaatggaagtccgacggtagtcgcggtattccggtttccagaagttatcgtcaatcgcctgttgcagcgcttccgcagaggttttcaccgctacgccttgttgctgcgccattttacctacggcaaaagcgatagcgcgcgacacgacctggatgtctttaagcgctggtaacactaatccttcgccgttattgaccagcggagaatgtttcgccagcgtctcactggctgacatcagcatttcatcagtaatgcgcgatgcgccggaagcgataacccccagaccgatgccggggaaaatataggcgttattacattgtgcgatcggataaatcttatctttccagatgaccggcgagaatggactgccggttgccaccagcgcgttgccttccgtccaggcgataatgtcctgtggcgtggcctccacgcgagaggtgggattagagagcggcatgacgatcgggcgagggcaatgcttatgcatctcgcggatgatctcttcagtaaagagcccggtctggccggaaaccccgatcaggatatccggcttcacgttacgcaccacatccagcagcgacagcacgtcattttcggtatcccagtgctggagattgtcgcatttctgcaccagttttgcctggaacggcaataaattaggcatccggtccgtcaacaggccgaagcgatcgaccataaaaacgttctgtcgagcggcatcttcgcttaaaccttcacgctgagtctgcgcgatgatttgttcagcaatcccacatccggcggaacccgcgccgaggaaaacgattttctgctcgctaagctgactgccggcagcgcggctggcggcgatcaacgtaccgacggtcacggctgcggtgccctgaatatcatcgttaaaggagcaaatctcatcacgatagcgcgtcaacagcggcattgcgtttttctgcgcgaaatcttcaaactgtagcaggatatctggccagcgctgcttaacggcctgaataaactcatcgacaaacgcataatactcatcgtcggtaatgcgcggatgacgccagcccatgtaaagcggatcgttgagtaactgttgattgttggtgccgacatccagcacaacgggaagggtataggccggactaatgccgccgcaggcggtgtataatgacagcttaccgatagggatccccatcccgccgatgccctgatcgccaagccccagaatccgctcgccatccgtcaccacaataactttaatgttgtggttaggcacattctgcaaaatgtcgtccatattgtgacggttcggataagagataaatacgccgcgcgcccggcgataaatctcagagaagcgctcacaggccgcgcccacggtcggggtatagataaccggcatcatctcttcaagatggttttgcaccagtcgataaaagagcgtttcgttggtatcctggatgttacgcaggtaaatatgcttatcgatttctgttttaaacccctgatactggagccaggcgcgttcggcctgttcttcaatcgactcgacgacctctggcagcagccctgacaaattgaagttgcggcgctcttctacgctaaaagcgctacctttgtttaacagggggaattccagcaatacagggccagcgtaagggatataaagggaacgtgctttcttggttatagtttccatgttactcactctttttcgaataactgtccctggcaccgtcgtttatcatcatatattgccttccaccagggaaccgaccctgagtataaagcattgtgagacgttaaggtcattcctataaacaaaaacaccattgcagatgcaatggtgtttaacgtcatttcaggactgtacgattacttttggctgtcggcgcggcgctttctgccggttgggttattcaccacgctgctggtgtcgccttcagtaacaaccttacgctggttggaaattctgtaatccagtccaagtatatgacgagcctgacggttcgatttcatgttaactcctcaatcctgttgctagttttaaggacaaattcgcttacgcgaaagaaacgtaacccctaaggttgccgatacagcatagcaggttttacagagtcgggtgctgcccgcttaccacatagttgatggtctgctggtagatgtcactgaggatgtcattgtcggaagcctcaacccatttggtcagctccattaaaatatcatcttcagtgacaacgcctaactccgcgcgtaatccttgttcaatcgcgttgaccaaggccggttgtgctgctgaggtatttgctgagtgataagtaaacatataatgcctccgtgaacatgtatttatttagtacggctcgcagaaaattaattcgtattcagcatggcaaatatttttgcggctgtggttaagattagtcctggagttattttaacgcaaggcggaactctaattgtttacccctgaagaaaatatattacgtttgccaattacatatcctcatacaaatagtggtcaattaatatacatttaaaaggctacttattgtgatttttatcctttattacaatgtgataggataaatctcaatatacatataaaatatacataatggaatacgcctccagaagaaaaagtaaggacaaaaggagggatatattctttaaagaaagggagccctgttggtttaatattcatcactgaaaaagcatacaactattttctatatctgaagtgcgggtaatcgacaacatgctacctccatcggcatggacaacgcagattagcagcatggtctatactttattttttgagccaacaggagagcaaaaatgacaatccataagaaaggtcaggcacactgggaaggcgacatcaaacggggtaaaggtactgtatcaacagaaagcggcgtgcttaatcaacaaccgtatggattcaatacccggttcgaaggcgcgcagggaaccaacccggaagagttaattggcgccgcacatgcggcctgtttctccatggcgctatcactcatgctgggagaggctggatttacgccgacatccattgacaccaccgctgacgtatcgcttgataaggtggaggcgggcttcgccattaccaaaattgcgctacaaagcaaagtcgcggtagcagatattgatgcttcaactttcgatcaaatcatccagaaagcaaaagccgggtgcccggtatcgcaggttctgaatgcggaaatcaccctcgactaccagcttaacgcctgataacctctccagcccggtaacgatgggttgatcgggctgatgaatatactttcagacggagggcttgctcccggtctatctgagatcctgccgtatttctatcacctcaacgcgccgtagaccacgtctgcggctattgtcgtggcctacttttccgccttaaaatctgctcgccatgttgctttattcatcaaacatcaaaatcagtcaacgtaaatatcaataatagccatatcacggagggtgatctttattcctgagagaggaggggtattattttctgtgttctacattaacgggttaacgcgcagatgtagaggttatttatataattattggagcaacaacaatgaataaattctcccttgctacagcaggtattatcgtggcagcgctggtaaccagtgttagcgtgaatgcggcaacagatactactaaaacaaacgttacgcctaaaggtatgagctgccaggagtttgttgacctcaatccgcagacgatggcgccagtcgctttctgggtgctgaatgaagatgaagattttaaaggcggggactacgtagatttccaggaaactgagacgacagcagtgccgctagccgttgagctttgtaagaaaaacccgcagagtgaattaagcaaaataaaagacgaaatcaagaaagaactctcaaaataagagtaaactgatatcaaaacccggcctgtgtgtcgggttttactatttgtgacaccgtcacaaataacatcttccatttcttctaccaatcacgtggtattgcactattttcattagagccctttcactatatggagacctaatgaaaattttaccgctggcactctttatcattccttttctggccggatgcggcgccaataatacgccgccgcaaacgcctattcccggggaaaaaacctctgccaaattacgtaccctggaaacaggcgcggcggctattcaatccagaccacctgtcgatgccatcagtacctaccttgacgggttccatttttatagcggtgataaaaacggacagatggaagcgcaccattacgttaccgtcctgaacgaagatgtcatgcaggcggtgatttacgacggcaatacgaaaaacgcgcgcctgatgggggtggagtacattatcagcgaacgtttatttaaaacgcttcctcccgaggagaaaaaactgtggcacagccaccagtacgaggtgaaatccggtagcctggtggcgcctggcttaccgcaggtcgctgataaagcgttgatgagtaagattgttaatacttatggcaagacctggcacacctggcataccgaccgggataaaaccctgccaatgggtatccctgcgctgatgatgggctttactggcgacgggcagcttgaccccgcgctgctggccgatcgggatcgccgtctgggaattgatacccaggccattaaacgcgagcggcaggatctgcctgaacatcccgttgttaagggggctaacgcctgggagcagggggaggttatccagctacagcgtgttcagggctctggcgaacacgggcgaggcgataccgcgcacttcggtacatctgagcaatcccgacaataattccacggttttacacgcagataggaaaaagaatgcctgttaagtgacagtgtcacgtaaagattagccccatagtctatgcttgttcttcggatgttgtagaggttatgggttaaacggagcgacaaatgagttcaaaaattttttgcaaaagctggggggctgaatatatcgccgctgatgttgtccgctttcgtctttgggccaccggtcagcaaaaggttatgctcaggcttgcgggtaaagaccaggaaatgcaggcgagcggtgacggctggtttacgctggacgtctccggggtgacgccaggtacggagtataactttgtactcaacgatggcatggtggtccccgatccggcttcccgcgcccaaaaaactgacgtcaacggtccgtcatatgtggttgatccaggcagctacacgtggcgcaacaccgggtggaaaggtagccgttgggagcaggccgtggtgtatgagatgcatacaggcacgttcactccggaaggcaccttccgcgccgcaatagcgaagctgccttatctcgctgaactcggcgttaccgttattgaagtgatgcccgttgcgcaatttggcggcgagcgtggctggggctatgacggcgtactgctttacgcgccgcattctgcctatgggacgccggatgatttcaaggcgtttattgacgccgcgcatgggtatggtctttccgtcgtcctggatattgtgctgaaccatttcggcccggagggaaattatttaccgctattggcgccggcgtttttccacaaagagcgcatgacgccgtggggaaatggtatcgcctatgatgtcgacgccgtgcggcgctatatcatcgaggcgccgttatactggctgacagaataccatctcgacggcttacgctttgacgctatcgatcagattgaggacagtagcgccaggcatgtgctggttgaaatcgcacaacgtattcgggaagacattaccgacagacccattcatctgactaccgaagatagccgcaatattatttctctgcatccccgtgatcaggatggcaatgcgccgctgtttaccgccgaatggaatgacgattttcataatgccgtccacgtttttgcgaccggagagacccaggcctactacaacgattttgctgataccccggaaaaacacctcgcgagagcgctggccgaaggattcgcttatcagggagaaatttccccccaaaccggcgaacctcgcggcgtaaaaagtaccggacaacctccggtcgcctttgtggattttattcagaaccacgatcaggtcggtaaccgcgcccagggcgacagactgataaccctggcgggcgctgaacgaacaaaagtattgctcgccacgttgctgctttcaccgcatattccgctgctttttatgggcgaagagtatggcgaaagccgtccttttcttttttttaccgatttccatggggatttagcccgcgccgttcgtgaaggtcgcgcaaaagagtttgccgatcatgcaggggaaaatgttccggacccgaatgcgccagagacctttcaacgctcaaaacttaactggaagcaacagcacagtgaagagggtaaagcgtggctggcatttacccgcgaactactgcttttgcgccagaagcatatcgtgccgctgttgtccgctgcccgtgagagctcaggaacggtattgcaaaccgcgcccgggtttattgccgttagctggcgttttccgggaggaacgctgtcactggcgctgaatattagcgccacgacggtattgctgcccgatttaccgggtaagaccctcttcgcctggccgaatgaatccaccgggtcgctttcccaacattctcttattgtccgcttagcccagggagagtctgcatcatgatcccaactgcaacgtatcgtcttcagtttcgtaatggcatgaccttcgatcgcgctgcggcgctggtgccttaccttaaaaatctgggtatcagccatctttatgcctcacccatctttaccgccaccaaagcgtcaacgcatggttatgatgtcaccgatgcgaatgagattgagccttctattggcgggcgcgaaggatttgaaagactggtggccgaacttaaagcgcaaggtctgggattgatcatcgatattgtgcctaatcacatggccagctcgctggaaaacgcctggtggcgcgacgtgcttgaatatggcaaggagagccgttacgcgcgccatttcgatattgactggtcgcgccgactgacgctgccttttttaggcgacacgtttgacgccgtgctggaaaacggagaaattgcgatcaagcccgatcccgctacgggtaaacccgcgttcgcctattatgataactattatccgcttgcgccggcgacgtggcaggggcgcgaggccgaaatactggcgcttaccgataaagccgctattgctgatttgcatgagcgccagccgtggaaattaatgtcctggcgcgatgccgctcgctcgctttcatatcggcgtttctttgaggtcacagggctggtaggaatgcgggtggaagataaaaccgtcttcgacgatacacatcggctgattctggagctggtcagaacgggggcggttgacggtttacgtatcgatcatatcgacggacttgccgatccgaaagcctatcttgcgcgtttacgtcaggaagtggggccggcgtgctatatcaccgtggaaaaaattctcgctaaaggcgagcaacttcctgatgactggccggtttccggcaccacaggctatgaatttatcgcctcgctggcggaggtgctggttgacgatgagcagatagacaatctgcgccaggcttacgagaccgttaaaggcgcgccagtggatatgcgggcggaattacgggcggctaaattgctgatggtcgatcgcaatttcgagggggaatttacccggctgctcgcgcttgcgctgtcgattgccagcgagctacagatcgcacaggaagagagcatcgttcggcaggcgttacgcgagttattaattgcctttcccgtatatcgcacttacggcacggcagaagggctaccgccgaccgatatttgcctgttacaccgtattgtggaacgggtaaagacgcttgaaaatcctccgcagccagaagcgcttacatttctgagccgtcttcttactggcgatgttcccgcctccagccaggaggaggcgacacagtttcgcgttcggttccagcaactcaccggtccgctgatggcgaaatcggtagaggatacgcttttctttcgtcaaaacatgggactggcgttaaatgaagtcggcgccgagcccgtcacgcatcacttctccatcgaacgctttcaccatgagatgaaaacccgacaggcgcgacagcctgatgcgttatccggtacgtcgacccacgataccaagcgaggcgaggatgcgcgagcacgcctgtatacgcttaccgaagcgccggaacagtggagcgaatgccttgcccgctggcggcagatgaaccagacccatgtcaaatttttgaatgatggcactgcgccaaaatcggcggatacgtggatgttatatcaggcgctgaccggcgtctggcccccgatgctacaaccacaggacgaaacaggtttaaacgcgctgaaaatacgctttgaagcctttgtggagaaagcgctacgcgaagcgaagctacgtaccgattgggtggacagtaatgaggcttacgaaacggcaatgcttgattacgcccgttatttactggcgccggataatcagacatttttgcaggatttttatcgttccttgcaacccttcatccgcgcagggctggttaacagcctgacgcagaccgttatcaagttaaccgcgccgggagtacctgatatctatcagggaagcgaggcgttgaattttagtcttgtcgatcccgacaaccgccgcgaaccggatttcgccacgctggcgcagcagttagaccaactaacgccgggagttttctcgcgcgaagagagttggctgaacgggcaggtgaatcagtatgtcaccgccgccttactgcgtttgcgtcagcagaatcatgagctcttccgttttggcgactatataccgctgcgggctgttggtcagcgtgccgacaaggtcatcgcttacgccagagtcaatcatgatgatgcgctgattgttgttgcgccccgactggtgttcgccgaatgtgacggcttattgtcacaatcgcatagcggtttctggtcaggaaccgacattattatacccggacagcttaatcagcatcgttatcgcaatgtgcttacccaggagaggttaatgcctggtgaacgcctgtcgttggcctcacaccagggcggcgtactggttttaatgagcgactgagtttatgtgttgatgtgccgtgacaggacaacgtttaccgtgggtggagaaagagaatgacaacaaacagggcttttgaaatcagatcaggatacagccatacgcttggcgcaaattatgacggcgaaggcgtgaatttcgctattttttccgcccatgcggaacgcgtcgagctttgtctttacgatccgagcggggagcatgaaatcgctcgtctggagttaccggaatataccgacgaaatatggcacggctatgtcccgaagttgcagcccggcgcgctgtatgggtaccgcgtttacggtccttatgacccggaaaatggtcatcgttttaaccccaacaagctgcttattgacccttatgcccgtgagctggtgggcgatattcagtggaacgatgcgcatttcgcgtatcaattacttcatgacgataaagatttgacctttgatgaccaggatagcgcgccatttacgcctaaatgccgggtgattgatccggctgaggcgaattgggaggatagacaacggccttccataccgtggtcgaacgccattatttatgaaacgcatgtaaaaggctttacccagcttaattccgcgatccctgagcctctacgcggtacgtttgagggcatgggacataaagccagcgtggattacattaaaagtctgggtattacctccgtcgagcttttacccgttcactggttcccggacgatcagcatctgctcgataaaggactgaaaaatttctggggatacaactcgctgggcttttttgcgccggcgacgcgctactatggtccaaaaggtattcagggattccgcgatatggtgcgcgctttccatgatgccggcgtcgaagtgatactggacgtggtctataaccatacggcagaagggaatgagcttggccccacgctgtcatttaaaggtatcgataacttctcttactatcgcaccatgcccgatcagcatcgctattacattaacgatacagggacaggtaataccgtcaatacctctcatccacgggtactgcaaatggtgatggattcccttcgctattgggcggagtcaatgcatgtcgacggctttcgttttgatttgggcaccattcttggtcgtgagccggaaggctttgatcagagaggcggtttttttgatgcggtaacgcaagacccggtgctggcaaaactgaaactgattggcgaaccctgggatatcggaccgggcggctatcaggttggcggctttccaccagggtggggcgaatggaatgataaataccgcgatacggtacgcgaatattggaaaggtgacaacgtcacaaatgatttcgccgcacgcctgctgggttccggcgatctctatgatttgcgcggccgtcgcccctggtcaagcgttaactttattactgcccatgacggcttcacgctgaacgatctggtgtcttataacgacaaacataatgaagccaatggcgaagataataatgacgggcataatgataaccgctcctgtaactatggcgcagaagggccaaccgacgacgagggcatcaatgcgatacgcgagcgacagaaacgtaatttcctgaccaccttgcttttctcgcacggcacgccgatgttattagcgggcgatgagtttggccgcagtcagatgggcaataataatggctactgtcaggacagtgaaatatcgtgggtccactgggataatttgccggaaaccgccaatgcgctacgggagtttacccgtcatctgattcaactgcgcgccacgcaaccgctgctgcgccgggaaagctggcgtgacggtctggagatccgctggtttaacgccggcggaggggcgcagcaatccgaacaatgggatgagggatcgaccataggcgtatgcattagtcgtcccgatcttcagccggaagcggggatctggcatgacgccttactgcttttcaatccgtttgaaggcagcgtaccgttccgtattccgatgtggggagaaggcggctgggtacttgaactgacgactgccgataacgcgcagcagggaatacggattaccgaagaaatggatttcgatctggccgggcgcagtatcgtgttattcagacgcccctgatagtgaaaccgcgctccggacccaaccggccttgatggccggttttttactggcgctcaggcgatatcatgccgcagaaataacaccggtgtcagtttaccgcccgaaaaattcatccgcctgttggtattcctttgattgtcttcaccgatattcgcttcaggccgtctattgccatttcaaggtaggtacgtggacatcccagatttaaacggataaatccgctgcccgccgggccaaagccgctgcccattgaaggagcaatacccgcgacatccgccattacccattttagctgttcgtcatccagtcccagttttttacaatccatccataataaataggttccctgcgccgggacaattcttgcccagggaaggtgctctgtcgcctgttcaacaaaccagcggcggttttccgccaggtaatccagtagcgaatccagccactgtctgctttcattccatgcggtagtcgccgcctgaacggagagggcgttaaagacgtccagcccatgagcgtccagacgagacaggaatcgctggcgaagcgtaggatcgggaatgagaaaattagaaattcgcaacgacgataagccaaacgttttgctggccgcagtggcggagatgacccgtttatgccagcgctcccctaaatgcagtaccgaggtaaaggtttcgccgggcagcaatagatcggcccatatttcatccgagatgagagtgacatcataagcttcacataataaaagcagttgctccagctcgttggccgaccagcaacgcccggttggattatgtggattacacaaaatcatcagcggagggcgctcatggcgaaacagcctttccagttggcaaaaatccatctggtagccgtcgtccggcgactcgctaaggggattctccagcagttttctaccattaagcgtgattattttggcgaaggagccatagtatggtccctgtaccactacgccgtcgcctggatgcgtcaacatttgcactaagagcgccaaccctggtacgacgccttccacgctgcatacccattcctgttttaacgtaagctggtggcgtgacgaaaaccagtgaagcagggcgttaaaataggcctcatcacgttcgctatagccaaatacgccgtgctcgattcgctgatgcaatgccgcctgaacctcaggcgggcaggcaaaatcgaaatcagaaacccacatcggcagcagtttcccagcgccgtcgccaaagtgacgctcaataaaatcccactttaccgaaccagtattgttgcgattgataatctggttaaaatccatcttgtttccttattatttcgtcactgacgtttgcggcgacttttctgaagcggaggcagttctggcaataccaactccgctaaaaccataaattaatgcgaagaagatcgccgcatagcactggatagcccagggcagaagatcaagcgtgctaacgcccagcgtggttgccatgtagacgccagccgaggtccacggcaggagaggttcgataacggtaccggcatcttctatcgtccgtgaaaggtttttagtatccagccccatacgacgataggcatctttaaacagttcggcgggaactaacaatgccagtttaccgtcgctggtcgctcctgtgaccaaaattgtggtgccgatagtggcggcaatgagttgaccaacgctatgaataatggtcagcagtcggttaatgatgatcgttaacgcgccggttaacgttagcgctccggcaaatgaaaaagcgcagaaaactaacagtatcgttcccatcatcgagaacattccgccccggtttagcagtcgcggaacatcggccacgacaccttctgcgccttgtgggaacatggcgatatcaaatccatcaatgaaagcgtccagtccctgtttgatgctcagtccctgcatgatgacgccgaggaacaaggcaagtacgcaggcgcttaacattaatgggatgacaggctttttgcgaattgcgccccacagtacgatcaccggcggcaaaataagaataatattaaaatggtatagcgactccagcgagtggatgatgtccgtaacgcgctgcggcgtagccacctcgcccagcatattactgtgtccggcgataagataaaccacggcggcaagcaggaaacttggcagggtcgtccaaagtaaatgctgaatatgctcaaacagagtagtgtctgcgacaatcgcggcaaagttagtcgagtcggacaacggtgagattttgtcgccgaaataagcgccagaaacaacggcgccagctgctgctgcaagagacacgtccagcccggcggcaacccccattaacgcaacgccaaccgtcccggcggatccccatgatgtaccggtacagacggagaccacgctggttaaaaagaaggctgcaatcaaaatatattccgggcttatgagttttagcccccagtacaccatgtagggaatggtgccactaaacatccaggtgccaatcaaaccgcccacgcagatcaggatcatgataaccggcattgctttagccagcttatccaccactgagttgatgatgtcttcccaacagtatccttgccaccatgcaatgcctgccgctaccgccgcagagcacagaaggagcggttcgatacgtagccccatgatgccgtaaccgataatcaacaataacaacatggagatgactgggattagcgctaaacccaatgacagcgttttcttcttgttttgtgatgcactcataatggagctccggtcagtaaggtagctcaagggtagggggatacgcttctcactactgtgatccattactttcgtccatgtaaccgattacatgagaagggttaatttgatagtcatcacagtttttactgttgacgacgcattcatcgtgaaaaatagggcgcgacagaatcgcggatcaccagttcggcattgaaatgattgctgctgggcggcggcgtaatgccctggtataactgtatcgccagttgcgcggcacaacgcgccatttgttcgaccggataatgcattgttgttaacgccggataaagataccgggccagcaccacatcatcaaagccgacaatagagagctgttgcggaagctgaacgccgcgttgatgaagaatacgcataatgccagcggccatcacatcgttaaacgtgaccgctgccgtaaggggaagcccgctattaataagttgatgcgcggcccgctcgccgccttcttcgttaaacggaacgctaatcacccagcgagggtctggagaaataccatattcttccagcgcctgacggtaaccatcaaggcgttcctgacgatcgataattggcaagtcagatgtcacacaggcgatgcgccgatgcccgttcgccaggagatatcgggtcgcttccctggcggcgctgcgattttccagccagatacaccggttggccataccggcgatataacgattaacaacaaccagcgctggaaagtgggctgcgtagcgcagcagctctttatccggtaatcggctggcgtgtacaacaatagcctcacagccttgattaaccagaaaatccagtcccgctttttccatttcttcgtcgtggccgccgctacataccatcaagcgatactgctgcttacgagaaacatcttctacgccgcgagcaaggcgggcaaaaaaaggatcggccagattgccggttaacaatccgagcatatcgccgctacgtttcgccagcgcgatagcggcggcattccggcgataattgagatcgcgcatggctttctctacacgttcgcgcgtgacgggttcaacccacgcggtctggttaatgacgcgtgatacagtcgcggttgatacaccggccatggatgcaacatcctttattgtcgccatgttaagctcatatttgttcgtttaaagggtatcaaagccattgattatcatgttacgtggaaatcagtgcaatcactgcggcgcagcctgaatttataaacatttttaaaatcatcttaaatcctggtaactgcaaattttagtagctaccgattttccagtgtattgtcagtatcataacgacctgggtgccgtcgaaaaatatcgtgctgattataggagtaaaaaacatggccgcgtatgacatcgaaaaggacatcgggccgcgggttcagattatccaggagatacacgaattaattctggcgggtgaaatggaagtcgccaaaaggatgctgcgcacgctgattaaagtcacgttcgcttatcctgcgatttttgacgaggttcggcaggaatgccaaatcaacaatgcgcatgttgtcgccggatgtggatccgggtatcaaagcgtttatagccgttgtcagagctgcagaacatcagtcagaaaaagcagcggaccagggtaaaacccactgagccaaaaacctgcgcgacgaaccggtcacagtggccggtttttttatgcctgcgtggcgtgtgctgcgtgaaatcgtgtgcaggataagcgggtgcaaatcaacagaattcgcgcagcgtcacggcagggaagggatcaaacttatgggccagaagttttttgacatacacgaatccagccgctttaacatgtcttttaaatgttctggtgaatttaacataatatacattatgcgcaccataatggcggaaggcgaaaagcagccccccagcgtgaatcagtcatacaaccagcgaccagccctggcagacgcaatgagcatacctatagtgaaatccgccacctgaggaatatcgtttttgcgaaacggattaagcaaatgctttagcggtggttctggcggatagtatgttgtgatcgagaaactccctctatctacattaaatgtcgtaaaaaaatcatccatcaatgccagtgcttcatcatcttccagccgtagatctgaatccaaatctgttgacggtgtcagttcttttttcttaaagaggtaaattccatcatggcttcttaccagttcataaatccgctgttcaagagtatcacttaccatattttatcgcttcctctggcaatgcgtttgtaatccctgactagtacaaaattaagctgtgtggtgcaggatacagactggtctacagcgtcgaagatgaaattatcacggtaactatcattggtgttggaaagcgtgaaaatgatgccgtctacaaaatgacacgacacagaagctaatcactcaggaaatactctctttcccgtcaaacggtaggcagtcacacagacggaacgccggagcctgattttcaaaaacaagtgaggcttgcttttgaaaacctgaaagcaacactgactgcagcaggatgcacattcgatgacatagtggatgtcaccaccttccataccgatccagagcaacaacttaacgacgtgatggcggtgaaacaggagatatttgcctatcccccttatcctaactggaccgctgttggcgttacctggctggccggctttgatttcgaaataaaggttattgcccgaatcccctgatgcttattctcggtaaaaccggtagcattatgtgtaccggttttattttattcatccctacccttcatcctgtatgattaacatgcaatcaccaaacatatcgaactgacatgactggatatcttctgaggcataggccttcatgagtagatcaaccccagcaaactgaccagttaacaccatatgcgtcgtttttggctgatgtaagttcgttagcaggcagtcaaccactttcagttgatagcctggatgtatataaagcgcagtccagccagaacttgctttgaggcaattgtgctccctcgaatacgcggactccaggcatcgtgtaacggtagttcctacggcaaaaatacgtccgccattttgcttcgcagtattaatgatatccgctgttgcttgcggaacctcgtagtattcttcgttgatagtcacttcctctacacattttgtttgtatttttctgttggacaacatttctgttgatgcaacatgtaaagtgatgaaggatattaacccacctttatctttgattttttggataagatcccaggtaaaatgaatgccggcagaaggtatttccaaagaaccatactttttagaaaaaacggaacggtaagcatctggatatttataaaacaagctggagtccacatactcatcaagacgctcaccatgactggctaaatagcaaattaaggcctcatgattttccacgacggcccggtactggctctcctcgctaaacctttgctctatcttaatggaaatttcagggttatcaaccaaatagaaaacatcattcgcgttaagcctttcctttaaaagtccggaaataattactctattatttggtaaaaatccctctaaaacaattttaattagcctattctgtcttgttttacagataaacatatggtttattatagtactgtcgttaaaacagattacatcaccttctttgatataatctgttaatttactaaagtctaccttatgaatttcccctttactccggttgaggacaagcattttacacttttccctgtatgaatcattggctatccaatgaggtctgagtgggatagtcatctgatcggtaatgcgaaaatcatatttttcggtaagcatatatttaccctttgaaaaaccattgatacggcgattgttatatagccgtattctgcagtatacgttggcctttcaaagggtgaaaattaactcgataaatgttgttgttatatttactttgctggctatttaatcaatgtcagataccgatattagcctggacgatcggatttgaccgcccttttcttttgcttattccggcattgaagcatcgctatccattgcatcggcaaacttttgcattagccgaacaaagacatcaagttcatcctgaggccagtctttaaaaacaactttgcccatttgctctcgagcggcgtctatacgctccgtcatcgcctttcctgtacgggagataacggcctcgcgtatacgacgatcgatggcattatgttgccgtattatcaatcccaacttctccagtttggcgacctgtcggcttaccgtcgtataatcacgaccggcacgttcggctaactcaacaacgccaatcggccctaaacgttcgatactaataaggatcgaaaatagcgcacgatcgagttgtatccccgcctctgcaattaatttctcatcattacgaggccggttaagcgcgctcaccacgcgaatcaacgcaccgtgaagcgccttcatttgctcggaaatatgtgtatcttgcacatttttattttctgacatagcatgtctcctcttatgtgcataatacacatatcggagagacgatgacaagatacaccactacagatgtactgatctgcggcgctggcgttaccgggcttactttagccatcgaactggcgcgtcacggggtctcatttcgcctgattgagaaaagaacgacgccttttatcggctcccgcggtaaaggtattcagccgcgaacgcaagaaatcttcgaggatcttggaatactcaataaagtggtcgccgccggcgggctctatccccgactacgaacctaccgtcacgacggaagctatgtagattcagatattgcgcatcatacaaaaccgacccacgccgaaccctaccatctgccattgatggttccacagaacgtgacagaaacgattatgcgagagcaattaaaagcatggggacatcgggtggagttcggctgcgagttacgacattttgcgcaaaccccacgcacagtcaccgcgtatgttgccgggccggctggagaagaggtcatcatcgcgcattatttgataggtgcggatggcggcggaagctttgtcagaaaaaaattaggcgtcagcttccccggtcgtacgttgggaatccatgcgcttgtggctgacgcttcactttccggtctaaaccgggatgtatggcaccattttaacgatggcgatatgacgcggatgataacgatttgccctctcgccggcacgcagctctttcaaatccaggcgttgttggccccggacgactcgcagaatttctcagccgacgtgctcacggcttttcttactgaacgaatcgggcggacggatgttcgcatccattcgattccctgggtatcgaagtaccagatgaatgcgcgcatagcggaacattaccgtgtgggtaaggtatttttagccggtgatgccgctcatgtgcatccgccgacgggtgggcaaggattaaataccagcatccaggatgcctataacctggggtggaaaatggcagcctcgctgcggggcgcaggagaagagcttctcgatagctatgaacaggaacgccgcccggtagccgaatcactgctccacctttcgacccgattacttgactctcaaaaacagggtggcatcaaacgagaacgcgacgttcaacaacttgacatccagtataccgactcccccttagcccacacgttgcccgaacgtcagcatgggttacaagcgggagaaagagctccggatgctcctcttttgggcgccggcggccaatcattacgattatttcagttactacaaggtccggactggaatctgttggcctacgaaacccacggtaaggtcatcgatgcgcggcgaggactgcgtattcatcacattggcgagcaggacgagctcatcgataccctggggcacttccgggaatcctatcatctggcgccgggtcaatgcgtggtgattcgacccgatggctatgtcggcgcattctttcacggcaaacagagcaacgatattgaaaattatctctctcgttttgccatagggattaaagatgaatactaatgtctatgagaacaccgacagcgaaactatcaccccgctcaacaagcggcgtattttgcctgttttcctgcttgtcggcctttacgccgccagtacagcggctgtaatgtcggtactgcctttttatatccgcgagatgggcggttcgccgcttatcattggaatcatcatcgccactgaagcttttagccaattttgtgcggcgcccctgattggccacctttccgatcgcgttggccgcaagcgaatactgattgtcacgctggctattgcggcgataagtttactattactcgccaacgcgcaatgtatcctgtttatcctgctcgcccgcacgctttttggcattagcgccgggaatttgtcagccgccgcagcctatattgccgattgtacgcacgtcagaaatcggcgtcaggcaatcggtatcctcacaggctgcattggtttaggcggtattgtcggggcaggcgtttccgggtggttatcgcgtatcagtctgagcgcgccgatctacgccgcctttatacttgtccttgggtctgccctggtcgcgatttgggggttaaaagacccttccacaacatcacgtaccacagataaaatagcggcgttctctgcccgcgctattttaaagatgcctgtccttcgcgtcttaatcatcgtaatgctttgtcatttcttcgcctatggcatgtactcttcacaattacctgtttttctttctgacaccttcatctggaatgggcttccctttgggccaaaagcgttaagctatctgttaatggcggacggggttattaatattttcgttcagctatttctgttaggttgggtgagccaatatttttcggagcgaaagctaattatcctcatcttcgcccttctttgtactggatttctcactgcgggtatcgccacgaccatacctgtgcttgtttttgctatcgtttgtattagcatcgctgatgcgctagccaaacccacttatcttgccgccttgtccgtccatgtatcgcctgcccgacaaggtatcgtcatcggaacggcgcaggcattaatcgcaatcgctgattttatatcccccgtattgggcggatttgtcctgggttatgctctgtatggcgtctggatcggtatagctatctctgtcgccattattggtctggtgacggcaatgatttacctttcaaaaagttcagtgctaatagtgaaaccagaaacagaataatatgacaacgtcacaaacattattgttcccttcttcccttatttatcaaaagtattgtacttatattgaatgtttaagaggtatttatggaaattatgctggctggcatttgcccttgtaaagcgcggggaaagcatgaaaaaaacatatctcgttgttatcgtactgtttttcatttctacaaaagtttatacactacttcataacaacatcttcttttgtcgaaacagcccggagtgtgatttgtctcatgttctccccgactaccgggagcagatttcaggcacaccgctaaaatataccttgattaatacagctccattagcacaggtggtagtcagacactatgaattattatcgcaacactggtcgccagatgacatggtaacccctgcgcaatggcgacataacgttgatatttatatccctgaaacggcaaaagagcaccatgctttggtggttgtaaacaacggaattaattatgataaaggcgtacaaatcactggtaaacccggtgatttcccccaggaaacactggcaagcatctcccgtgatacgaataccatcgtaatatcagtgagtgatatacctaaccaatatttaacctttcaggatgataaaaaaccactgaaagaggacgagagcgtttcccgaagctgggcattatttatggaagcgccggagaaacgtgagttaatgcctttaaatattcctatggtcactgccctatcgcaagcgatgagattagcaaaaaaggagttaacgcaatggaatataaattcctttatcattacaggtatttcaaagcgtgggtggaccacctggttgtcagctatcgccgatcctgatgttgaagcaattgttcccttcgccattgatctacttgatattgatgcttcacttgagcatatttatcaatcatacggtggaaattggcccattacattctacccctactaccagcaaggcatagatgagaaaataaaatcccccacatttacccaactaaggcaaataatagatccgttaagatatctcaatactatttatcaaccccgacttgcaataccgaaatatattattaatgcaagtggcgatgattttttcgtaccagacaacactcgcttttattatagcaaacttcctggcgtaaaatcattacgtatagtgcctaatatgaaccactactcaattaaccagttcgctgaagaaagcctcgttccttttattaataggtttcaaagtaaaaaaacattaccacagttgatcggccttattcaccaccatcttcttacggtctatttctcagaagcgccggtaaaagtcgttcgctggacagctaacaatccaaatgcgcgtgattttcgttatgcctgtggcatccgctataagccgcttacaatagatattcccgccaacaataagatcagtattacgttaaatgaaccgaagacaggttgggaagctacctatatcgaagccacttttaatgatggctatgtcgccacgagtcaggtttatattacgcccgatgaaaaatacccacagacagcaccaccttccgttaacgccgcatgtcaaacgttaccggggcgtggattaggggaaaacgatagccccgattgaattttcaagtaattatctgagtttaaataattttatccatcacgcttgcgatggataaaaatcctctgcgataaatttttgttatattgatcacgttctaaccacaagagaggtgatttgaaaataaccttaaaatattgtggtcaggccgctagaccacaataagaggattaatcatgaaaagaaaaacaatgggatggcttatcgtttttcttctatttatagtttacatgctcaactatatggatcgttcagcattgtcgataactgcccccttgatcgaaaaggagttaggatttaacgccgcggagatggggatgatcttcagcgcgttttttatcggatacgccctgtttaattttattggtggctgggccagcgataaagttgggccaaaaacggtttttctcatcgcagcgttactatggtctgtattttgtggcttaactggtttggtcaccggattgtggacaatgcttatcgtgcgcgttcttttcggtatggctgaaggaccggtcagcgctgccggaaataaaatcatcaataactggatttcccgaaaggagtctgccacggcgatcggaatttttagcgccggttccccgctcggcggcgcggtgtccgggccgatagtgggcctgctggcgttatccttaggctggcgccccgcatttggcattattttcttatttggcctggtctgggtactactgtggtactttatcgttagcgataagccaacaatgagtaaacgcctggcgccggaagaacgcattgattttgaaaatcatgaggacgttattttatctgatgatggccgggctacgccttcactcggctattacatgaaacaaccaatggtatgggcgacaactctggcttttttcagctacaactatattctttttttcttcctgacctggttcccaagttacctgaaccattcgttacatctcgatattaaagaaattagtatcgccacggtaattccctgggtcatcggcgccattggtatggtactcggcggcgtctgttctgatgtaatttatcggattaccggtaatgctctgctctcacgtcgacttattctgggcgtatgtctggcaggcgcggcggtatgtgttgccgtttccggtaccgttagcactattggtagcgcaattacgctcatgtcagtttcactcttcctgctctatttaacaggcccaatttattgggcggttattcaggatgttgttcataaagataaggtagggagcgtcggaggagccatgcatggcctggctaatatatccggtattatcggtccgcttgtcaccggttttatcgttcaatttagcggtaaatatgactatgcgttctatctggctggtgctatcgctatcgtttcaagcctgttggtcttcgtgtttgtaaaaagtaaaggattcaaagccaatgaaagtcaaagctgtgttcattaataagcctggtgaagttgaaacccgctgggtggattatccccataagaaagaaaatgaagtattaattaaggttgatgctgcaggcatttgcggatcggatatcggggcttttcgtggaacgaacccactggttacttacccaagaattattgggcatgaagtgaccggaattgttcttcaggaaggcgccggaatgccggacaatattaaagaaggtgaccgcgtaattgttgacccctatatttattgtggtcactgctacccttgctctgtcggcagaactaattgctgtgaaaatttaaacgtcattggcgtgcatgtcgatggcgcaatgcaggaggtggttactcatcccgcacatttaattcataaaataccagataatgtgccttctgaaatggcgccgctggcagaaccgctgaccatcgctctgcacgcgctgcatcgggcaaacgttaaggctggggaatatgttgccatcatcggcgcgggggccattggtcttatggcggcattaagcgcgcgtcattacaaggcaacgcctattctgatcgatattgtggaagaaaggctacgctatgcgcaaaagcttggcgttccttatgtgctgaacgccgctgacgatcaggttatcgacgctattaaaaatatcacccacggcaccatggcgcaggtcgtgatagaagcttccggcgcaaatagcgctattcgaaatacgcttgatttagcatcgtttgctggtcgtatttcgtttaccggatggccaaaacaggaaacgtcgctgccgacgaacctgatcacctataaagaactggatttacgcggttcccgcaccagtgccggtgaatttgatgaggcattacgcatgctgtcaacgctggagattaatccgcaagatgttgtcagtaaggtcgtcaatcttgatgagatccctgatgcagttaaagaacttgatcgctatccggagcgctacttaaagattaatgctgttttccattgatttacggcgagttctaccgcatggcatatccgccatgcggtgttatttaccgacaaacttagccgccgacaatctttctcacatagcgtaaatgttccagcgatccctcataagcgctgtcagcatcagactggcgcattgcatccactatcgctttatgttgtttgttgagattaagtaaaacatttctgtctccagactgctcatcaagcccggcataagggatattaatccgttgttcccataacatacgggacatatcgaacaacacccggttacggctagcctcagagatcgcaaggtgaaactctttatccagcgagtaaaagccgtggacgttattatcgttaatggcttgatccatacgatgataaatcgcctctatttggttgatgacgtcaacgttatcgttttgtgcggctaagcgcgcacaatggctatcaaccagctcgcgagtagagagaatttcttcgatggtatagtcgctggcaaggtgttttttatctgaaacgataaccccattaccggactgaatcacgatccatccggagatctccagtacaataagggcttctcgcaaggaggcgcggctcacgccaagctgttttgccagttcgcgttctggcggtaaaaaagttcccgggggaaaaatattatcattgatcagcttaatgatgaggttggctatcttctgatagagcctctcctgcctgacctcaggtataaccatgcgccctccaatccatatccaggggattttgaatggatttagcataccatcctggcgctggtgatcgtgataattaattaccgtgcatgataaagagaagcaaccgccggtagcctccattaccttcgccgagactaccggggaaactaaaccgagatgagctatttatcctttgacgttgattttctcgaacacgggcgctgtcgcgttcttaaactgagaaagagaccaggttttatagttgatatcattgtagccgcgcaccatcatctcaccgtgcgttaagtcagacagcgttgtccagaccgtatattctgagaccggtttgcgggtagcgttgccttccccttcactccccatataatcaaccgtaatatttttcggacgatcgaaacggctcataatatgtgcaagcgtattcattgcgtcgtgggcggatgtcgcttgcggcgcatatgtggtgtaataaacgccgcgtataaaacgggaaaccgacgtatcggacgatggcaagtctgcaatagcaatcccgctatcaggctgcatcacttttatcccgcccaatgtgcctgaagagcggtccacattggttaattgcgtataattattcagatttgtcagatgccaggggaatgcgggaccatttgtcatcacgcgagtgggattgtcatagacatggaatttgccattttccacttcaacgacaatgcttcctcctttcttgtcgtaaaacgcgtaatgaaatggcgatttcagatcgccaaaccgatgcagttccggtgaccagaatttgccctcttttattgcctgttttacctcgccgacagtagcaaaacgggccagcgcccattctcccaacgaggtgacaggaattgcctgtttatattcactcgcgggcaatggcggcaactgcgcattcatgatcatgttttcactaaatgacaatcccgcgctattcatgccttcaagtatgtctctgctatcgccatcagtaatggtggaagtaatggccagtatcggatacttcgcctgatagcttatcccctggctgccatccggcgtttttttatcaaactgtgttcccgccgggtaatacgttaaccatgagggtaaatcctgcatatattccagcgtacgcccatgaaaaatatcgccttgtttatcctgaatagcaagggttgtgcaggcctgtgcagccatggcgtatgaaaacagcgccggagcgataaataaaattgctttactttttttcatcatgctctccttgtttgtaaaatgaattggatgaatatattaaattaaacctatcaatggttatgcagcacgtaattaattgtgatcttattttacaagctaataaatttaactgacgggtttaaaggagagttaaacacagcgaactaacatgaaacgcgttatccgtgtgaccatttaaaaaaatcccatcatgttataaataaaaaacacggtttcttatcaacattaagagatatcttcacaacgctatatttactccacatcaccaataacattaaattaatttatgtttttgagtaatgtgagtagcacacatgtaatcagttgttacgaattagaaacataattgctactaaaacacgttgagaaagacaagaaatgcaacatatgatgcccacactaactatagtggtttgggataaacgttatgcaaacacaagatacattttatcaagttatgcgtagacacggcgtgacaaggcgtagcttcctcaagttttgcagccttaccgcaacgtctttaggcctgagcagttcgatgattcctcagatagcttatgccctggagaataaaccgcgtacgccagtgatatggctgcatggtcttgaatgtacctgctgtaccgaatctttcattcgctctgcgcacccgttggcaaaagatgccattttgtcgctcatttccctggattatgacgacaccattatggccgccgcagggcaacaagctgagcaggcgttggcggatgtgatgcgtgagtacaaaggaaattatatcgttgccgtggaaggtaacgcgccgctgaatgaagatgggatgttttgcatactggctggcgagccgttcctggagaagttaaaacgcgtcagcgcggatgctaaagcgattatcgcctggggggcctgcgcatcatggggctgcgtgcaggcagcccgtcccaacccaactaaagccacgccggttcacaaattaattaccgataaacccattattaaagtgccaggctgcccgcctatacctgaagtgatgtccgccgttatcacctatatgctggcatttgatcgcatccctccccttgatcgtcttggacgaccaaaaatgttttatggccagcgaattcatgacaaatgttaccgacgcgcgcatttcgatgccggtcagtttgtggaagcgtgggatgacgaaggcgccagaaaagggtattgcctgtacaagatgggctgtaaaggcccgaccacctataacgcctgttcaaccgttcgctggaatgatggcgtgtcttttcctatccagtcgggtcatggatgcctcggatgttcggaagatggattctgggattacggttctttttacagccgggcaacgggcattccgcaaaccggcattgaagctaccgccgataaaatcggactgggcgttgccggcgtcgcgggcgctgccgccatcgctcacgccacggtgagcgccataaaacacgcccgcaataaaaacaacacgtcatcagaaaacgctccggaagagaaaaaataattatggcatatccttatcagactcagggttttacgctggacaatagcggacggcgaattgtggtcgatccggttactcgcatcgaagggcatatgcgttgcgaagtgaatatcgacagtaataatgtcattactaacgccgtgtcgaccggcaccatgtggcgcggcctggaggttatcctgaaaggtcgcgatccgcgagacgcctgggcatttgttgaacgcatttgcggcgtctgcaccggtacacacgctctgacctcaatccgtgccgtagaaaatgcgctgggaatcgcgattccggacaacgcaaactgtatccgtaatatgatgcaggctacgctacacgttcacgatcacctggtgcatttttatcatctgcacgcgctggactgggttgatgtggttgccgccctgaaagccgacccgcatcagacctccgccatcgcgcaaagcctttccgcatggccgctatcctcgccgggatatttccgcgatttgcaaaatcgactgaagcggtttatcgagtccggtcaacttggccctttccgtaatggctactggggacatccggcgatgaaacttccgccggaagccaatttgctggcggtcgcccactatcttgaagcgctcgattttcaaaaagagatcgtaaaaattcacaccgttttcggtggtaaaaacccgcatcctaactggctggtgggcggcgttccttgcgccatcaaccttgacgaaacgggcgcggtcggcgcagtgaatatggaacgcctgaaccttgtcagttccatcatccaaaaagctcgccagttctgcgaacaggtttatcttccggacgtcttgctgattgccagttattacaaagactgggcaaaaatcggcggcgggttatcgagcatgaacctgctggcttatggcgagtttccggataaccctaacgattattccgccagtaatcttctgcttccgcgtggggctatcattaacggtcgtttcgacgaaattcatcctgtcgatttaaccgcccccgatgagattcaggagtttgtcactcactcctggtatacctatggtaacggcaataacgataagggcctgcatccctgggatggtctgaccgaaccgcaactggtcatgggcgaacactataaaggcacaaaaacttttatcgaacaggtggatgagtccgctaaatattcatggattaaatcgccgcgctggaagggacatgcgatggaggtaggtccgctggcgcgttatctgattggatatcatcaaaataaaccggaatttaaagagcccgtggatcaactgctgagtgtattaaagctgcctaaagaagcgctcttttctacattaggacgtactgccgcgcgtgcgctggaatccgtatgggcaggcaatacgctgcaatatttcttcgatcgtctgatgcgtaacctcaagtccggcgatacggcgacggcaaacgtcacgctctgggaacccgatacctggcctacatcggcaaaaggcgttggtttcagcgaggcgccgcgtggcgcgctggggcactggataaaaattgaaaatcagaaaatcgacagctatcagtgtgtggtaccgacaacctggaatgccgggccacgtgacgataaaggtcaaattggcgcgtacgaagcggcgttaatggggactaaactcgccgttcccgatcaaccattggagattttacgtactctgcacagcttcgatccctgcctggcctgctccacccatgttattgataatcatggaggggagctggtcagggttcaggtacgatgacgacgattcggaggtctcaatgcatctcaaagaaataaccagccaggggtactatatctatgaagctccggtccgtttatggcactggatcacggcgttatccattgtcgtcctggctgttacaggatatttcattggccgccccctgccatcgattcaaggtgaagcgacctttatgttttggatgggctggatacgactgatccattttaccacggcgtatatttttactgtcgcgctgctgtttcgtatttactgggcatgtgtcggcaatgagtacgccagggagatgtttctggttccgttctggcgccgcgcctggcgcaaaggcgttatcagcgaaatccgctggtattttttcctcgaaaaagaggcccatcgttactatggacataatccggtagcgggactggcggtaatgttctatttctggatgtccgtactgatggtgtgtagcggctttgcgctctatggcgaaggacttggaacagacagttgggcgtatcaatggtttggctggatgattcgcctgactggcaacgatagcctcgcgctgcatttctggcaccggctgggcatgtggttcattatcgccttcgtcattgcgcatgtttataccgctatccgcgaagacattatgagccgacaaagcgtgatttccgtcatgataagcggctggcgctggttcaggtgataacaatggcagaagtaacaatcttagggcttggcaacctgctttgggcagatgaagggttcggcgtcagagcggcggaaaagctgtttgaacagtatgccgataacgagaaagttgacgttgttgatggcggtacgcaggggctggcgctgctgccctggctgcaacagaccgaaaaactgttaatcatggatgctatcgattttggtatggcgccaggttcgctggcgatgtttcgtgatgaacaggttcccgcctatctgacggcgaaaaaactcagtttacatcagaccagtttttctgaagtgctggcattgctgcaattaaccggcggccagttatcggagattgtgctgattggcgtgcagccggaatgtctggatgactatggcgggagtcttacgccgcaggtaaaggcgcaactgatgcctgcggtctatctcgcgcaggaagtgctggcgcaatggggtatcaccgcctcttcagcggccttgcccactgaaagactcaatcattacagcctgtgtatggaacgctacgaagatgaacgcccagatgcgcaaagcgcttgccgggtcggcgatattcgggtgctacagagagagaaatcataatgtgtatcggcgttcctgtgcaggttatttcacccggtcagtggttcgccaaatgccgcgaccgacacggcgagcttatcgacgttgatattcggcttgtggctccccccttagcaggcgcatggctgctgacatttggcggcgcagcacgacgagaaatggacgaagcggaagccgctgaggtactggcggcgctggactcactggaacaggccatgctcacgcaaagcgatccgctgaccggttttgccgatttattgtctcgcacgcctgaattaccggagcatttaaaaaaatgactatctcaccccaaaatcctgtttgtccactggcggataaaggctttctggttaccgatgcgcaaacgctcccgtcgttgattaatgcgcatccgactgtgctggttttgctgcaaagcgaccccaacaaacatccggaagtcgccgacagttgggtcatcatcccggagatcctcaagcaatttccggcgacgtcttataccgcggcatttgcggatagcgaacagagtgaactgatcgcccgggagtatcgcattctgaaatatccggcgctgcttttctttcgccagcaccgttttgtcggcagtctggcgggattatatagctggcaagaatactctcagcgggtggccgcattgctgaccacaccgggctatcgtcaggatattcccgttatcacgcaatagaatgaaaggtaacacacgtgaattattccagaactattccagtcgttaatattgccggaccaggctcgcagccagaagaggaagactttaactttcttcctatccccgccggcattaatctcccgctgacgccggttttaccggaacaggcgctgcccgctgagctccgtgttgccagacacatcctgactacgcttattcgcgatatggataacccagtggcaacgctcccctttcccctgagctataagctgaatgccactgagcaacagaatagcggtttattggatcaactgctcggcgaaggtgaaatctccgcccgggtactattatccgatggaaaagaacagcgtattcaggagacggtttttacgggcgtctggcgtgtgcgtgaatataacgctgaccagcaacgggttgccgatgaaattatcattggcccgatcccagagagcatctggcagacgcatccgcagccgccgattacgccagaattgccgccacaaccggcgggattgatgaatggtgcctttatcgcgcatgaaatagccgagcgcgtaaaacagccggtaaaagagccgcatatcattaacttaacgctgttgccagtaaacgatgccgatcgcgagtatctggatcattttttaggcgaaggttgtagcgctattttttcacgcggatatggtaaatgccggattgtaagcacgcattttcccggcgtatggcgggtcaattatttcaatgatatgaacacattactgcaagatatgattgagatagcggacattcctgatatcgccgttgcaggcatcgatgatatcgaagatgcctacgcggggctaaaaaatacgttggaatggttgaaagaatacccggttacagaaaatgagccagtggtgcgcatggagtgcaaagtatgttggtgggtttacgaccctgcgctgggcgatgacgtatggcaaattccacccggtgtgcccttcagccagttacctgattactggtgctgtccggtttgcgaaaccagtaagtccgggtttatggtgatcgatgaaggtaatagttcgtgcaaagattgaccgtctattctcacccgctacggattatctggcaggaggcgccgatcggtcgtttgttacagggcgcaacgccggtatacgcaaaaacgcttatttcacgtttgtttacgttgtgcgctcaggcgcacagcgcggcggcggctttactgttgtttcctgaaaagaagccagatatgcaggccgcacaacaagagctggcgcgagaaacgctccgtcgcgcgttgacagactggctccccctgtttagccaccgacaggcaaccgctgaagaatgggcgttgttacgtcgcggagagttatccccgctggcaagcacaatcttttttgacgatgatcctcagacctggcttgccgctggcgtaaagggctgggaagcctggtttttgcaagagcgttctgaaaccgcccgctggctggcggcagtacagaatatcattacacctacactaccgatggcatcgtccccggaccatacgttaataacccatggtcccctggatgtctcgcctctggctatcgaatatccgctgctgtcagcctgttgtcttagcggtaaaacgactgcgctacgtctgctggcccgctgcattacgctcgcccgaagtttgagcgcccttcccaccctgcgctggaatcgttttgatgatggcgaatggaaaatagcggtagtggaaaccgcgcgaggatggttagttcatcaggccagactgacgacgtcaggcaatattcttgattaccgtattatctcgcctaccacacgtcacgcccaacctgacggcgtcattgctcgcgaactggccactattccactctcattgtggtcgcaacagttacaggtaattgatccttgtgtcgccgtaaatattgttgaatgaaggagctggcccatgcatgaattagccctggcgcaaaatattatcgaattgctggaggaacaggcagtaaatcaccagttcagcaaggtaaagcaagtctggctggagattggcgttatggcctgtgttgaggtgccggcgctgcattttggcctggacgtcgccgctcgtcatacccttgccgacaatgcgcgtttccacattactatcgcaccggcgcaaggttggtgtctgtcctgtaatcaacccttcacctctcaaacatccacactctgttgtcccttttgtcattcaggcaaagtgcagatagatgacagtagcagaatgcgcattcgcgagatcgaagtcgaatagtcaacgaataggcaataaaaaaggacgccagaagcgtcctgaaataataaaagaataaattaacaataataaaggttaagcagtgacccagttttgggaaaaggagggtatccctaaactgtcttaatcagcaagttttatcaaaactcgtagactaagccgagcgccacggtgttgtctgtattaggattcgatgggttgccatcttttagcagattgattttgtagtcaacatacgcggacatatttttattgaagtagtaataggaacccacatcaatatatttcacaaggtcgaacgaacccagtccatcaacatcattggctctggattgcaggaatgccagtgacgggcgtaagccattatcaaattgatattgccctaccatttcccagttatcggttttatgtgcaaagccgcccaatgtatcgcccatataggtcatatcataagtacgggtatagtttgccgccaggtaaatattattggcatcatacttcacgccgccagtccaggcttcagcgcggtcgccattgtcgtatttatcttgcgtcatctgatcaagcgtgcgtttggaactggtataggctgcccccaggctcacccccatgcccaaatcatatgtcgctgatgccccgaaaccatcgccattctggtacgcgatactttttctggcattattacttaaaggatcgccttctttcgacaggccgtcatttttaccctgatactgcaacgcaatattcagaccatcaaccagaccaaagaaatcattattgcgataagtcagaacgccattcgcgcgtccggtcataaaattatcggaagcttcatacgaatcattaccaaattcaggcagtacgtcagtccatgaaccaatgtcgtataacacgccatagttacgaccataatcaacagaccccatatcggcaaatgccaaaccagcaaaaccgagacgcgtccagctttgcggggaaccgctggagtcaccatcttccggacgattggcgttgacctgatactcccactgtccaaaaccggttagttgatcggtaatttgagtctcgcctttaatacccatacggatataagattgatcgccatccgtactatgattactggaaaaataatgcaggccgtcgaccttgccatacaaatccagtttattgccatccttgttatagatttctgctgcgttggcggctccagccatcattacggctgcggctaccgcagataacaccactacttttttcattttatatgccttatttgtcttatttttggactttccgcaaaacctgctcgcggaactgtccaggacaatatcactaacaattaccgtgcgttaagtttcaaagtgtaatattagcttgctatgtattagtgatgttaaaatgcaagttaagcatgactacatcaatgatatgccctgttttctgctgtaataacaagggggttaccagtagagaactggcttacggtcggggatgccagggcgagaatggcactgaatactcggctgacattcgttaagacggaatcataatcaagtcagttgaggccacagtccttcttatttttgtgtataatttgttacgtttacatttatttctaaattagcgttatgaaaatatcagtactactgaaatagcacttcttcgcttcgtgtatttttactatggttaattatcacatagcgcaaacggtcatttgcatatcactattcataagattaactatttaccagcggtaataaacataaaagtaagtcaatggacaacaacaatactgaaactctaaatgttgatattttgagtcatgtcgttacaaacaaatacgatattcttaattgcactactcccttttcggggtagttttatagaaggatgttttttattgttcgtgagccatgctcctttagtataaaagtgaacgtaacaggaaagataaagcgtctcaaaaacagaccatatgggtataactattatgcaaaaaacgtcactattgttttcggccgccgcgataacgttaactctgatggtgtcatcggcatcagcggcaacgccaaccgccgcacaaaatgaagctacgtcgaccgttaaacaagaaattacagaaggcattaaccgttacctttattcaatagataaggcagacccaacgttaggcaagcagctcttttatgtttcaccggaaaccagttttattcatccacgcggtcacgaacgcggatggtcgcagatcgctgaaaatttttatggcaccactatgggtaaaactttcagtaaacgcacattaaaactggacgctccccctgctattcatgtgtatggcaatgccgccgttgcagagttcgactggcattttaccgcggtacgccgtgataatgggcagactcaacacacgacaggccgcgaaagccaggtgtgggcgaagataccaaacacaggatggcgaatcgttcatgtccactactccggtccagccaaaaccggcgttggagaaggctattaagctttgctcttcaggttatggcgcagatgaacattctgcgcctgttaagacaaactcaggtcagttgatagcgcttatccggtatccgtttttccggaatatccctttcatcattcatttgcagtaaatcgatttctatcgcattgcatatcgcatccagcggtaaatcattattttcagtaccgaacggatcttccaactcttccgctaacgcatccaacgcgataaacgtataagaaataagcaccgaaataaacggcgtcatatagtgcagatcaaccaccagtgcaaatggcaacataatgcagaaaagataaaccgtacgatgcaaaattaacgtataggcaaaaggcaccggcgtgttggcgatgcgttcacagccggccaacactgacgacatatcatttaaacggttgttgaggctatgaaataaaatatcggaaagctttccgctgcggcggcgaatcgccagccactctcccatcagcaataagatacggttagcaggggaatgggaagcgacaactttctgtaacgcctcctggtcaagatagttgcccagaacttgcgtttgaggctgtcgacgcaatgtcatacgcaaacagtgggcaaaagcgatttgtaaccgaacaaaatcctcgataccgcgttcatcaggcaaggttgttttcacctcacgcagtattgagcgtgaagcgatcatcaactgcccccacaaatgtcgcgcttcgacgtaacgcgcataacaggcattattgcgaaaccccagaaaaatggcgatagcgacgcccagtatgctaaacggcgcaagggtaaacttaatacccagcattgtgtaccagggcagcatgataataatggcgatagaaagaagaaagttaaggagcagtcgtgaaaagattttagataacacggaaccatgccagacaaatatcaggcgaatccagtgctgttgtggtctaacgatcatgattatcttcagcaggtaaaaaagcactgtcattaaacgtgatccagatcaaggttgcaagcttctggtgatacacggatcccctgccctgtagaacattttttgcacagtgctgacaggcattgaaaaaaaacaaccaaacgtatgttgtaactaaaaagacacttcagcacatgagatatataacggtcaacggctgctatcagtggtatagggtgatttatcggggaaagcgtcagcaacgacgcgctgctctaccgctgattcatttgtatgaccagccagtaatggataacgctgacaatatactgttgctgcgcttcgctcagcggttctccctgaggaatctggtgccacttcgccaggcacccgcgacagcaggttgccgtcgcatgttgcgcgataaataccggatggccccgcatcggcgtttgcttaccatcattcgccgggtgagctggcgccagtcgctgggcgataaaatcggcggcgtgtttatcaatcacctccgcgcctttatcccagcaatattgtctttcttttatcccgagacgaaaacgcgaacgaaatgtcgatcgcgccaggcgggcaaagagcggttcaagcgcattcatcagtataccgaacgtcctaacgtttgtgttaattgttcaagcgcggcgatacctgccagagagtttcccgcaggatccagctccggactccagacggcaatcgccatttcatgcggcacaatggcgacaataccaccgcccacgccggatttagcgggcaatcctacccgccaggcaaactctccggcattctgatacatcccgctggtcgccattagcgcattaatttgccgggcctgcatgggggtcactaccggctcgtcgagatgaaacgcctcgccctgattcgccagaaagacaaacgtcctcgccagttccatgcagctcattttcaacgcacagtagtggaagtaattttgcaacacggtaggcacatcatgatgaaaattaccgaatgatttcatcagccaagcaatagcggcgttacgggcggaatgctcaaattcagagcgcgcgaccgtagcgtcatacgtaatatccgatacgccgcaaagcgcgcgcacaacttccagcatccgctgacgcggcgcgctaagccggccttgcaacatgtcgcataccaccagcgcgcccgcattaataaatggattacgcgggatgccttgttccatctctaactgaaccaacgaattgaacggcgagccggaaggatcttttccgacgcgctgccagatctcctcttccggataatgacgcatcgccaccaccagactgagcactttcgaaatagactgaatagagaagcgttcgtgcgcatcgcccgcctgataatgctgcccgtccacggtacaaatcgctatccccagctttgaaccctcgacggacgctaatgccggaatatagtcagcgactttgccctggccaatgagggggcgaacgcgctgtaaaatcgtctctaaaattgcattatccatggcccaggccacaacatgctccttgctcgcaggtctgaaaaggcctgcgagtatagcagagggcgccacgcgacgtcagggcaattagacgcggttcttccagacggtctgcacattacaaaattcgtgtaaaccaaagtgcgaaagctcgcgaccgaagccacttttcttcaccccgccgaatgccacacgcgcatcgctggcgctgtacccattaatgaataccccgccgcactcaagacgcgccgccatctccgcggccagcgtatcgtcggcggtaaagatcgtcgccgacaggccaaactcactgtcattcgccagcgcgagggcgtgcgccgcatcttttgcgacggtaatggcggcaacaggcccaaaaagttcctgacgaaatgcagtcatgtcaggtgtaacatccgccagaacggtcgcggcataatagttgccctccccggcgattttctccccgcccaacagtagccgtgcgccttcggcgacggaagcctgcacctgttgatggagttcatcacgcaaatcaaagcgcgccatcggccccaggtcattctcttcaaccagaggatcacctatctttaatgctgcggcagccgccacaaaacgatcggtaaacgcctgcgcaatgccctcttcgacaataaaacgtttggcggcggcgcagacttgtccggtgttttgatagcgtcctgcaaccgcagcttttaccgccagctcgagatcggcatcattgagtacaataaacggatccgagccccccagttccagtacgcactttttcagcgccgccccagcctgagcgccaatcgccgcgccggcgcgcacgctaccggtcaccgtcaccgccgcgattcgcggatcgttaatcatctgactcacgccctcattattggcgttcacccatccatagacgccagcgggagtaccggcttccgtcaagattcgggctatcatctgcgcgcaacccgtgacattgggcgcatgttttaacaagtagctattccccgccaacagtatcggcactgccccgcgtaacacctgccataaaggaaaattccacggcattatcgccagaatgacgcccagcggacggtattcaatcaccgcctgctgattttctaccagcgtaggctcaggattcagcattgccgggccatgttccgcataccagtcgcataacgcggcggatttcgtcacttccgcacgcgcctgctttatgggtttacccatttcacgcgtaatacattgcgccatctcttctgcatgagcgcgaagcgcctgaccaatatcgcgtaatgtttgcgcccgttgcgctactgatgtcattttccactttttgaaaccgctcgccgccagactcagcgcatgttcaatctcttgcgcgttagcccagggcattgccgccagcgtctggccggtcgcaggattaacggataacgcctgtgttgcagtcatcatggtcatgttctttctctcgttatcaggggagttgtaccatcatgacgccctttaccatttctgaaaaatgaataatattaaccagactattcacgaattaagaaaaccatggacctgacgcaactggaaatgtttaacgctgtcgctctgacgggcagcattacgcaggcggcggcaaaagtacaccgcgttccgtccaacctgaccacgcgtatccgccagcttgaagccgacctgggcgtctctctgtttattcgcgaaaaccagcgactcaggctgtcaccagccgggcataactttttacgttacagccagcagatcctggcgctggtcgatgaagcccgcatggtggttgccggagaggaaccgcaaggactgttttcactcggcgcgttagaaagtactgccgccgtacgtatccccgcgctgctggcgggttataaccagcgttaccctaaaattcagttcgcgttaacgaccggtccttccggcgccatgctggatggcgtgctcgagggaaagctgaacgccgcctttattgatggcccgctaatgcatccggggctggaaggtataccggcttaccaggaagagatgatgatcgtcgcgccacacggccattccgtcgtttcgcgggccagcgaggtgaatggttataacatctatgcttttcgcgccaactgttcttaccgacggcatttcgaaagctggtttcatgccgatggcgcgacccccggtacgattcacgaaatggagtcatatcatggaatgttggcgtgcgtaattgccggcgcaggtattgcgctgatgccagcaagtatgctcaacagtatgccaggacatcatcaggtggaagcctggccgctggcggagaagtggcgctggcttaacacatggctaatgtggcggcgcggggcgatgacgcgtcagcttgaggcctttatcgagttacttaacgcccaactggcgagcgtcgactgaagacgaaacggcctgcgaagtaaatgagaagcaggtcacaaaatgattgtcttttcgccagtaaacgttttaagatcgcggcctcaccttctcgcaactaacccgaaatatttttatgacaatcaatccagtttcccgcaaggtcgcgtggctacgggtagttacgcttgctattgccgcttttattttcaataccacagaatttgtgccggttggtttgctatcagacattgctgaaagctttcatatgcaaaccgcgcaggtcggcatcatgctaaccatttacgcctgggtagttgccgtcatgtcgctgccttttatgcttcttaccagtcaaatggagcgccgtaagctactaatttgtctgtttgttttgtttattgccagccatgtgctctcctttctggcatggaactttaccgtgctggtcattagccgtattggtatcgctttcgcccacgctattttctggtcgataaccgcctcgctggcgatccgcctggcccctgccgggaaacgcgcgcaggcattaagtctgatagcgaccggcaccgcgttggccatggtgcttgggctgccgataggtcgcgttgttggtcagtattttggctggcgcaccaccttttttgccatcggcatgggcgcattaattacgctgctatgtctgattaagcttctaccgaaattgccgagcgagcattccggctcactaaaaagtttacctttgctattccggcgcccggcgctgatgagcctctatgtgctgaccgtcgttgtggtgactgcgcattacacagcttatagctatattgaaccgttcgttcagaatgtcgccgggctcagtgcgaattttgctaccgtcctgttactgatcctcggcggcgccgggatcatcggcagcctcgtgtttggtaaactgggtaatcgccatgcctcgtcgctcgtcagtatcgctattgccctgctggttgtctgtctgcttctgctgctgcctgcggcggatagcgaagcgcatctggccatactgagcattttctggggcatcgcgattatggtgatagggctcggtatgcaggtgaaagtactggcgctggccccggacgcgaccgatgtcgcaatggcgctattttcaggcatctttaatattggtattggcgctggcgcgctggtaggcaatcaggtgagtttgcactggtcaatgtcggccatcggctatattggcgccatacccgcctgtgccgcgctggtatgggctgtgctcatattccgcaaatggccagtgacgctggaagaacaaccgcattaagacattcgtctgccgggaacaggtttccggcagacgaaaatgcgccttagtggtacgttttaataatttccaacacgccgttgataataaattgcacgcccatacacaccagcaggaatcccattaagcgggagatcgcttcaatcccccctttacccaccagccgcataatagcgccagaactgcgtaagcatccccacaggatcaccgccacggcaagaaaaataatcggcggcgcgaccataatgacccagtcgggaaactcgccgccatgacgcaccgtggaagcggaactgatgatcattgcgatggtccccggtcctgcggtgcttggcatagccagtggaacaaatgcaatattagccgtcggttcgtctgccagctcctccgatttgcttttcgcttccggcgactcatgcgccttctgctgcgggaaaagcattctgaagccgataaacgccacgattaaccccccggcgatccgtagccctggaatcgaaataccgaaggtgttcataactaactgcccggcgtagtacgccaccatcataatagcgaagacataaaccgaagccatataggactgccggttgcgttccgcactattcatattgcccgcaaggccaagaaacagcgccacggtggttagcggattggctaacgggagcagtacgaccagccccaatccaatcgctttaaacaaatccatcataatactatctcttacccatcagcgtttcatgaaccggaagtataaagtgatattgcccaggcgcgccatttcgccagtgtgcaagtcaatattctttacaacctataacctgtaattatcaattagttacaagttatcacagcacaataccccggacgccttttagcaaatcgtggcatcggccaattcatttagttgacttatacttgcctgggcaatagtatctgacgaaattaattacttgccggggcaaccattttgaaaagcaccagtgatctgttcaatgaaatcattccgctgggtcgcttgatctacatggtaaatcaaaaaaaagatcgcctgttaaataactatttatccccgctggatatcaccgcaacacagtttaaagtgctttgctcgatacgctgcgcgggatgtattaccccggttgaacttaaaaaagtgctgtctgtcgatctcggcgcattgacgcgaatgctcgaccgcctgctgtgcaaaggctggatcgaaagactgccgaatcctaatgacaaacgcggcgtactggtgaagctaacgccggacggcgcggcaatttgtgagcaatgtcatcaacgaccagggcaagacctgcatcaggaattaacaaaaaacttaacggcggacgaagtggcaacgcttgagtatttgctcaagaaaattctgccgtagacaaaaaagaggtatgacgatgtccagacgcaacactgacgctattactattcatagcattttggactggatcgaggataacctggagtcgccgctctcactggaaaaagtgtctgagcgttcaggatattccaaatggcacctgcaacggatgtttaaaaaagagaccggtcattcattaggccaatacatccgcagccgtaaaatgacggaaatcgcgcaaaaattaaaagagagcaacgagcccattctctatctggcggaacgctatggctttgagtcacagcaaacattgacccggacgttcaaaaactactttgatgtgccgccacacaaataccggatcaccaatatgcatggcgaatcacggtatatgctgccgctgaaccatggcaactactagtttgtttatgcgccacgcgaagagcactatgaaaatgctgtttcccgccctgccgggtctgttacttatcgcctccggatatggcattgcagaacaaactttgttacctgtggcgcaaaatagccgcgatgtgatgctgctgccctgtgtaggcgatccgccaaatgaccttcaccccgtgagcgtgaacagcgataagtcagatgaattaggcgtgccctattataacgaccaacacctttaacctctttgccccgttttgcggggcatttttttagtaccgtctggcgatgacaagtccgccgctattacctcgcggcatggtctgaaattagcgtttgtcttcttagtaacataatgcctcatcccctgacgcgggcagtacggcgcacacgaaatccaaacacattgatatagagtccagccataatcagtactgcgcccgcaagctgcatcccggtcaacgtttccccgagtaacaccgcggcgctcgccagcccgactaccggcaccagcaatgataacggcgccacgcgccaggtctcatagcgccccagtaacgcgccccagatgccgtagccaagtatagtggcgacaaaagccagataaagcagcgacaatatcgtcgtcatatcgatggtaataaggctttgcgtaatgtgatccgccccctccagtagcagcgatgacagcaggaacggcaggatcgggatcagcgcgctccagaccaccagcgacatcaccgccgggcgcggactatgttgcataatttttttattaaagatattgccgcaggcccagctaaatgccgccgccagagtcagcataaatcccgacatcgctatatgctgtccgttgagactggcttcaatcaataccagtacacctataatcgccagggcgatccccgctaactgcttacgttgtaaccgctcactaaaaacaaacgcccccaaagccatggtaaaaaaggcctgcgcctgtaataccaacgacgccagtcctgcgggcataccaaactttatcgcgcaaaagagaaaggcgaactgcccaaagcttatcgtcagcccatagcccagcaacagcgtaagcgggactttaggccgggcgacaaagaaaattgccggaaacgccaccagtaaaaatcgtaatcctgccagcaataatggcggcatatggtgcaggcctactttgatgacaacaaaattgagcccccatacgacaaccaccagtaacgccaaaaaaccgtctttacgcgacatcatcggcccctgtcattattaaaattttgtaaaaaggtaagttatcggaaatcagtgcgccataacaggacttttctttttaccgtgagcatggcattgaacaacacacgatgggcaaaatcctgcgttatggtatgttaagactacgctatagcgtatagacatcatgcttttgcgggcacggtagattaaaacgtcccgatacgtaacctccatttcaggcaggaaaaatgaatccaggattgagacgttcgacgttggctctactcgcctcatcgctgttattgacaattggacgcggtgccacgctcccctttatgaccatctatcttaaccgtcagtacggtttaggcgtggatctgattggctacgcgctgaccagcgcgttaacgatcggcgtcatctttagtcttggctttgggattctggcggacaagtttgataaaaagcgctacatgttactcgcgattatcgccttcgcctgcggatttatcgccatcccaatggtgcataatgtcgtactggttgtcctgctttttgcgcttattaactgcgcctattcggttttttctaccgtcctgaaggcctggttcgccgataacctcaccgcgacaacaaaaacacggattttttcgctcaattataccgtactcaatatcggctggacggttggcccgccgctcggcacgctgctggtgatgcaaagcatcaatttacccttctggcttgccgccatctgttccgcattcccgctggtctttattcaggtatgggtgacacgatcggttgccgccagcgaggggaaaaatgccgctatctggtctccctccgttctgctgcgcgacaaagcattattgtggtttacgctttcggcatttctggcctcctttgtggggggggcctttgcgtcctgtatttcacagtacgttatggtcgttgccgatagcggcttcgcggaaaaagtggtagccgtcgtcctgccggttaatgcggttattgtggtcagtttgcaatacgccgtgggccgtcgacttaccgccgtcaatattcgaccaatgatgacgaccggcaccgtcttttttatcgccgggctcatcggatttattttttcaggcgacaatctgtttttttgggggctttcagcggcagtattcacgattggcgaaattatttatgcccccggcgaatatatgttaattgacaacattgcgcctgccgggatgaaagccagctatttttcagcgcaatcgctgggctggctgggtgcggcggtaaacccgctggtcagcggcgtcatcctgacgacgcttcccgcctggtcgcttttcgttgtcctgataatcgccattgtgttcgcatgggcactgatgttaaaaggaatgcggattacccctacgcaacaggctatcacctgttaattatctgcagccagtcatgtgcgccgtttctggcgcaccgggttaaccctatatattgcaggctaattatctgctgtcactgcggtaattcaggaatattcctgggcgctgacgaaaatattctaatgctttacccttccagtaaaataaatacgcaattcagactttgcttaagtataaattagtactatagtctgtacgaggttttttaaaaaagaggatgcacgctaaaataaggagaaacgagatgttaggcagtattaacctttttatcgttgtattaggaattattttattttccggatttctggccgcctggttcagtcataaatgggatgattaatgaacggagataatccctcgcagagccggccccttgctgcatcgttgcgcaaggggccgcttttgtctggatggcaggcaaaaaaaaaccgccggttcaccagcggtaaatgcttgcatggatagatttgtgttttgcttatacgctaccgggcaaattcttgcgaggataacggatcgctaacgactgtagcaccgtcaatatcaatgaagcttaaacgatacgcaaccagacctgaataagacattatgggaccttttgtcccccaggcgcttttacaagacccatggtatcaggccagccgcgtgccccgtatggctgacctggagattgccggttagcgcgcgttatttttgcagtcggttcacgcggacaagcggttccttcgctttcttgtccagactaccgttaatgttgatcatttgatccggctgaacttcccgcccatcaaatacggcggaaggaattatcacgttaatctcgccggatttatcacgaaatacatagcgatcgtcacctttatgatcaataaggttgccgcgcagcgaaacggtcgcgccatcatgcagggtttttgcctgttcgatggtcattttttctgcatcatccgtaccgcgataaccatcctcaatagcatgaggcggcggcggtgccacgtctttttttaatcccccctgatcttccgctagcgcgtaaggcattatcagaaaacttaaaaatgcagccacctgtagtttcatgctctctccttaataacgtctatttgacgtattaagtctggccgctatttttagtttttacaaacatgaatttacccgcagaatattaagcaataaaatcaacccatccggattaatatgcaaccgacatcagcgccggtgagcgcgaaagcgtaacggcgtaatagagaacttgccacatagctgaagtcatatgcatcaacgttttgatagcaattcagattaatcggctttattttttgaggataatggccttacgcataatcaatgacagtcatcgccgtaagaaagtaagcaagttatgcaacagcgggtttgttggtaactggataaaataatcattcactgacaatgtcataaaataaatatgccatacttgagaagaacgaacagatttcttttgtctctggtaacggaaaaataaacgatgagattagaacagcacgatattgtcacccttgatgaagccgaatccgtcgatagcctgacaaaaaaacttggtgatttactggttaaccagaaactccgtctgaccactgcagaatcctgcactggcgggaaactggcttcagcattgtgcgcagcagaagatacgccctcattttacggtgtggggtatgtcacctttactgatgaagccaaagcaaaaatcttacgcgtacaacgccacagccttgccgaacataccgccgtcagcgaagcggtcgttactgaaatggcacagggcgctaaggatcaggctgaggtcaatatcagcatagcgatcagcggctatggcggtccggaaggcggcgaagatggcacgccggcgggcaccgtttggtttgcctggaatattaacaatacaacttttacaagccgacaacatttcaacggagattgtcaggaagtattagaaaaatgcgtacacttcgccctcgctgaattgctttttctgttaacgaagaaagcataaacaataatttcatctgaccggtcagaacaactcccggtcagaacaactcccggtcagaataaaaaaatgcgagcctatggcccgcatcgtatgtgcaatatttcagaatatatttacgaaatatcaggagtaaaattaattgccggatttccgtccgccactgtggttattctggccaccttttttacccgcttcagatgcacgttgtgggtcgtttttaaagttcccaccgctatgctggccgcctttacgacctgcttctgaggctttctctttatcttctgcaaaattaccggaaccgccgcgatgttctgccataatataatcctcatgatgatgttgcgttttaaatatgatatgtcttctcatatcatgtgatacagttctaaatctagtcgccctgtgcgcagtgtcaaattcatttctgcattatttacataataccatcacatggcggaaaatatattttttaaaacatcagcagcgaagcggtaataaatctttggcaatcaagccaccacgggaaaataagtagaaaaatccgaatgcacgccctctttatattcagacaatttaaccccataaatttaactggctgtcatcagaagtgcaggattcattttcaggcggttgttcgacagtgccgaacaaccgtatcagcttagcgatcgagcccacgatattgcaacatggggtcaatatgcggttcatgtccacgccaggctgaataaagcgtttctaaatcagtactattcccccgggaaaggatagcatcacgaaaacgctgcccgttttcacgcgtcaggccgccctgctctacaaaccattgataaccgtcatccgctaacatttgcgtccacaggtaggcgtagtatcccgctgcgtagccgccgccgaagatatgggcaaaataactgctgcgatagcggggcggcactgccggtaaatcaagatgctcggcggccagcgcctgctgctcgaactcagcgacagactgctctgctacgctctcctccagcatatgccagcgcatatccagcaatgcggcgccgagcaattcagtcatatcgtaacctttattaaataaactcgccttgcgcattttttcctgtaaatcagcgggcattttttcaccgctgtcgacatgacgcgcgtagcgttcgaacacgcgtggatggctcgcccaatgctcattaatctgggagggaaactcgacaaagtcgcggggcgtattggtacctgaaagcgtggcatagcgctgaacggcaaacaaaccatgtaacgtatgaccaaactcatggaagagcgtaataacgtcgtcccaaagcagtaatgcaggctgcccatcaaccggtttctgatagttacatacattgtatataacgggccgggtttcattgagtgtggattgctcgacaaaattccccatccacgcgccgccgcttttcgagtcccgcgcgaagaagtcgccataaaataacgccatgccgacaccatcggaatcgaaaatctcccacacccgaacatcagggtgatacaccggaatgtcaaaacgctcgacgaaggtgatgccgaatagctggttggcggtccagaaaaccccctcttgcaacaccgtatttaaggcaaaatagggcttcagttgcgcttcatctaacgcatatttttcccgccgtacctgttcggcatagaacatccagtcccaggcctgaacggtgtagccgccctgctcaccatcaatgacgttctgaatttccgcctgttcattgagtacacgctgacgcgctggcggcacaatgccacgcataaagctcagtgcggcttgcggcgttttcgccatctgatcggccattttccatgcggcataattggggaaacccagcagttttgcctgacagcgacgaatctctaccagacgctgaacgatagcgcgggtatcgtgggcatctcctttttccgcccgagtccatgacgctgcgaataaattttcgcgagtctggcgatcgcgcagcgtagcaagcgcaggctgttgcgtcgtattaaggagcggaatgaaccagcgctcctccaggcctttttcacgcgccgcttcagcagcgacggtcatttcttccgggcttaatcctgccaggcaatgcgcgtcatcgaccgccagcccgcccgctttacttgccgccagcagacgctgattaaactgactcattaaggtcgcggattcagtattcaataccttcagttgcgctttatcctcttcggcaagctgcgcgcctgccaacacaaaacgctgatggatcacatcgaccaaccgtagcgactcatcatccagccccagtgagtgacgctgttgccagacggcatccacgcgagcgaataacgcgctattcagataaatatcgttggagagcgccgccagctcggcagaaaaggcctcatccaaccgctggagttcatcgttagtgtgcgcggccgtcatcgcgaaaaaaatgctggtgacgcgtgacagaagcgccccgctttgctccagcgccagaagcgtattcgtaaagtcaggggccgccggatgattgacgatggcctcgatttccacgcgtttttgccgaacgccctcatcaaaagcaggacgataatggcaatctttgatccgatcaaaacgcggtgcctgatagggcaacatactctggtctaacaaaggattcgtcgacatttttcactcctgaaaataggttgatcataagagtaagcttccccctatgctgaccgcaaccgtgttaaccaggattaccctttcataaacgccgcgtgctatggtaatacaacacaaaaagcgttgaggaactgtgtgatgatcgttttagtaactggagcaaccgcagggtttggcgagtgcattgcacgccgttttgttgagaatggacataaagtcattgccacgggacgtcgtcatgaacgcctgcaagcgttaaaagatgagcttggcgagaacgtattgaccgcccaactggacgtgcgcaaccgcgcggccatcgaagagatgatggcctctctgcctgcgcagtggcgcgatattgatgtgctggtcaataacgccggtctggcgctgggtcttgaaccggcgcataaagccagcgtagaagactgggaaactatgatcgatactaataataaaggcttaatttatatgacccgcgccgtgctgccaggaatggtcgaacgtaatcgcggtcatatcattaacatcggttcaaccgccggcagttggccttatgctggtggcaacgtctatggcgcgacgaaagcctttgtgcgccagtttagcctgaatttgcgcacggatttacacggcacggcggttcgcgtgaccgacattgaaccgggcctggttggcggtaccgagttttccagcgttcgtttcaaaggcgacgatgagaaagcgggtaaaacctacgaaaataccaccgcgctcacgccagaagacattaccgaagcggtatggtgggtggccacactccccgcgcatgtgaatattaataccgttgaaatgatgcctgttacccaatctttcgcagggctcagcgtccaccgtagctaagaggttatacccggtctgcgggccgggtaatccctggcaaacgtatctgcaaccagaaacatgatcggtatagaccgccacggaaaagtggtagagtatccgggtcaaccgcctaaaaagtaagaatgaatgaccgtcgaaacgcagcttaaccctacacagcctgtcaaccagcaaatttaccgtattcttcggcgtgatatcgtgcattgtcttatcccgcctggcacgccgctatcagaaaaagaggtctcaacccgttttaacgtttcgcgtcaaccggtgcgcgaggcttttataaagctggcggaaaatgggttgattcagatccgccctcagcgcggtagttatgtgaataagatttcgctttctcaggtacagaatggctgctttgttcggcaggcgatcgaatgcgcggtggtccgccgtgcggcggcgatgatcaccgacaaccagtgctatcaactggcgcaaaacctgcacctgcaacatattgctatcgagcgcaaacagattgatgattttttccagcttgatgacgatttccaccaaaagctggcgcagatcgccgattgccagttagcgtgggataccattgaaaatatcaaagcgacaatcgaccgggttcgctatatgagtctggatcatgtttctccgccggagatgttgttgcgccagcaccatgatattttctccgcgctggaaaatcgtgacggcaatgcggttgagagcgcaatgacccagcatttgcaggaaattagcgaatccgtccagcttatccgtcaggaaaacagcggctggtttagcgaagactaacccccctttaacgtcggggtgagacgccttctccgctttctcaccctgcacattcccgcctaaaaagccgtgagcttgatcaaaaacaaaaaaaatccgcaacgataagcgtatttatatgtcgcccgtcatgcggggaaacctgcgggctttggcagtaagtttgaaaggagaaaacacgatgatgacatacgatcgtaaccgtaacgcaatcactaccggtagccgggtcatgataagcggcacgggtcataccgggattatcaaagccattgagagcgaaggtctggatgcaggtcaaattcgccgcggcaaaacggtgattgtcgaaggttgtgaaggtaaattcgcgccggttgaattgattcgtcttggcatgaactgataccacaggccgccaggaaccgttccggccttcccggtagcataatgctaccgggtctctgttacgctatttcaagcgctcggcatatttcgccacgctcgctttcgcgccatatgtcagtaaactgtcataggcttcttgcactttttgcgtaaaccgctccgcctgcggcaaatcgttgccgaaaatttcagccattcccagcagcgccttaacacgactggcgccttcttcactgtttgccacggcgcgctgaataaccggcaatagcggatcgctgacgtcgatcgccttaccctgctcatccacgccgccaacgtaacgcatccaccccgccacgcccagcgccagcaaatcaaaatcgctatgattagcaagatgccagcgaacggagtccagcatacgctgcggaagtttctggctgccatccatcgcaatctgccaggtacgatgacgcagcgccggattacggtaacgcgcaatcaactgatcggcataacgctgtaaatctaccccctggactttcagcgtgggcgcctgctcgcgtaacattaacgcctgcgcggtcagacgatagttgtcgtcagccatgcagtcattaatatgctgatagccggcaagataccccagataagccaggaatgaatgactgccgttaagcattcgcagtttcatctcttcaaacggaaccacgtcggcgaccaacgtcgcgcccgcgttttcccacagcggacgacccgccacaaacgtatcctctatcacccactggcgaaacggttcacaggcaacgcccgccggatcgcgcacgccggtcagttgttcgattttatccagcgtctccggcgtgaccgcagggacaatccgatcaaccatggttgacggaaatgtcacgttttgctcgatccatatcgccagttccgcatccacctcccgggcgtaagccgtcacaacctgacgcgtcacatgcccattttccggcatgttgtcgcaggacatcacggtaaatgccggtaagcctgcggctttacgacgcgctaacgcttcgacaataatacccggtgccgttagcggttgatgcggattttgcaggtcggcggcaatcatgggatgttccagcagaagttggcccgtggctggcgaatgacaataccctttctcggtaatggtcagagacacaatcgctatttgcggttcgcacatcgccgccagcacacgttccagaccatcaacctgaacatgcaacgccgctttgacgacgcccaccacacgcgccgtccaggcttccgccgacatctccgccacggtatagaggttatcctgctgctttagatcggcaatctgctgttcgccgccaataagattaacctcataatagccccagtcgctatgctgctccgcagccagaatatctgtataaaccccctgatgcgcgcgatgaaacgcgccaaaaccgagatggaccatccgcgccaccagcgccgcacgatcgtaatcaggaagcgtcgcctttgccgataaaagcctgttttgcattttataacctctatattctgaaagcggaacagtcgcagagtaacgcctgccctggtacatttggatttacgctaattaaacaaaagtgaccgggcagcatggccgaaaccgcattagcgttccggccataccgtcgacacgatttaactcgtctgggttgcggagtggcgtaacttctctgccgctgtcgcttccgccgcatcctcaggcaagctcagatcgcgatctctgacctccggcatcaacaacgcagaaatcagaccaatacacgagtagagcaccagcataattaagatgggcagccaggaatcggtcatgttacaaaagatccctgcgaggacggggccaaaaccgaccgccaccagcccccctgcctcttttgaaatcgccatccgggtgaagcgattacgcgatccgaaaatttccgccatggtgatgttttccagcgcaaataatcccagcacggcaaagttatgaataacaatgagcgccgccataattacgccagggctatacgttttatctaccacaatagacagcatcggccaggcgagaataatcgcggagatattcaatattatatacggcagccgacgaccgtatttatcggacaaccaccccaagagtgggatagtgataaaaccaattacggaacttatcattaacgcatcggttgggatagatttgttaaataataacgtctgaactaaatatccggcaaggaaggtttgaataagcccggaattgcccgcctgcccaaaacgtaaaccggtagccagccagaaagatttgctggtaaacatcgcgcccaatgtattttctgacgcaggcgttaacgctggcgatttttcgccttcgcttactttttcgaataccggactttctttcagattcattcgcagccagatcgcgaatatcataacaacgacgctcgccaggaaaggaatacgccatccccaggcgatcagttgttcgcgttcaagcgcaaagaacatcaccgcccagatcgccgtcgcgctcaacgtaccgcagttggtgcccatcgcgaccagcgaggaaatgataccacgctttcctttcggcgcatactcggccagcatagtacccgcgccggaaatttccgccccggcgcccagcccctgtataattcgcaatgtcaccagtaatactggcgcaaaaatgccgatttgcgcatacgtcggcagtacgccaatcagcgtggtgcagatccccatcatggtgatggtaataaacaatactttttttcgtccgattcggtcgcccattttaccaaaaacaaaggcgccgataattctggctatataacctgcaccataggtgcccattgccagaataagcgccatcgcggcagactgttccggaaaaaatatctcatggaagaccagagccgcgcctagtgaatataactgaaaatccataaattcaagcgcggtgcctaaccatccagatacggcagcgcgcactaaatcctgagtcgatcgttcatgctttatttgtgtcatataggcaatctctaagaggtaagatgcgtaccacttactcgcaattatttatattatttcgcaaacgtgagtaagactttgcagcattgacgctggtctttctcgaaaagctcaatcgcgtcggtgacatgttgataatcaaatgtatgcgttatcagcttatccggatcaataagccctttattcagccagtcaatcacgaccgggaatttattggcattaagacgcgatgaataaatagccagctcttttccggtaataccctgctgtacaatctcacacgggtcgctggaaaatcccatcaggacaatgcgtgccgcagacgatgcaagtgtaatcgcctcttgcaggatagcgggatgacaggcggcatcgacaatcaaggtcggctttagcgccttctgctgtagaaattccgccagtgaatgttgaccattattgagggtccagtcagcgccgctctgcttcgccatcgctaaacgctcttcaatgcgatcaacgactatgaccgttttaacctgataaacccccttcagcgcctgtacggtcgtcagtcccatcgggcctgcgccatagataagcgccacgtcctgctcggtcggattcacttgtcccgtcacatttgccgcaatggtaaacggctcaaccatgacggcatgatgatctgcgatgttgtccggtatgcgatgagcattacgggccggcgccaccgcatactcgctgaaaccgccgtcacgatgcacgcccagcaccaccagcgaggtacacacattgggtttaccgactgaacaagggtaacaatgcccgcaactgatcaccggatcgacggatacccgttctcctatccggtcgcgattgatgttgtcgcctaccgcgtcgatgacaccgaaaaattcatggcctatgacacggggatattttgcaaagggattatgtccccgataaatatggctatcggaaccgcagatacccgccagtttcactttaatgcgaacttcgcccggcgcaggctgcggaagcgcgcgcgtttcgatagttaatgtattcggtttttcgattacgatgcttttcatttttcgctccttaccagttccacagtgtgccgtcttccaggcgggccaccggcaaataggctggatcgtacggatatttcgccgccagtttttcatcgaactcaatgcccagtcctggcttgtcgcccggatgcatatagccgccctcgaacgtccagttatgcgggaaaacctccagcatctgttcggagtagcccataaactcctgcacgccaaagttaggcacccacaggtcgaaatgtaatgcagcggccatacaaaccggcgacagatcggacggcccatgcgaaccggtacgcacctggtagagcgaggcaaaatcggcaatgcggcgcatcccggtaataccaccggcatgggtaagcgtggtgcggatatagtcaatcaattgctcttcaatgagctgtttgcaatcccagatactgttaaagacttcgcctaccgcaatcggcgtgaccgtatgctggcggatgaggcggaagcatgcctgattttcagccggcgtcggatcttccatccagaacaaacgatagtcttcaatacctttgccaaagcgggcagcctcaataggcgtcagtcggtgatgcatatcgtgcagaagatgttcattaaacccgaacgtattacgcacggcgtcaaacagctttggcgtaaaatcgagatacttttccgttgaccacaattgttcttccggccactggccttttgtcgcgggctcataggccagccccttgcctttcgccatgccgtaggtggttttcatccccggaacgccgcactgcacgcggattgctttgaacccttgctctttatgacgcgcgtagtcttccagcacatcgtcgatggtgtggcctgtggtatggcaatacaccatgacgccttcacgcgaagcgccgccgagtaactgatacaacggcatattggcggctttggctttaatatcccatagcgccatatcaaccgcggaaatggcggacatggtgacagggccacggcgccagtacgcgcctttgtagaagaactgccaaatatcttcgatgcggcgagcatcccgcccgatgagctgtgggcacaggtgatcggtaaggtacgaggccaccgggagctcgcgtccgttcagggtggcatcccccagaccggtgatcccgtcttccgtggttatctttaaggtgacgaagttacgccctggacacgtaacaaaaacttcagcccctacaatcttcatttttattccttacatcgcattatgggatgcaggaaatttacccaactgagctactaccatacaagtatattgatgtaaaaagcgctgccagatcacaaaatgttctggtcgcgcggcaatgttacgtacgtccccatccgacgacgataatcagcattccacacagcgcgatcagcgcgccgcaccagtcataaaccgtgagccggacgccatcgacaacacgtaaccacaggagcgcagtacagacatataccccaccgtaagccgcataaacccgcccactcgccgccggatgcaaggtcaaaagccagacgaataacgcaagtgacgcagcggcgggcagaagccaccacacgctggcgccgcgcttaagccatagccagggaagaaaacatccaatgatttcacagagggcggtgacaaagaaaagcagagtcgtctttagcatgagattcatttggttacgaaatgataagtgataatacaacagaatatcgttacggttatccggccattcttgtgtatatgccaggcataaggattggtgtagaatttacaggtggtttaccgcttttcccctctaatgaaaggatgttgtgatgaacaatacgctgagcaaacgcctgtgcctgacggcaatgcttacgttggcggccgttgtatatactacttccgcattcgctgaaaccagtaaactggtgattgaatcgggagatagcgcacaaagtcgtcaggaagcggctatggaaaaggaacaatggaacgacactcgcagtctgcgccagaaagtgaatacccgcgcagaaaaagagtgggacaaagccgatgccgcctttgataaccgcgataaatgcgagcaaagcgccaacatcaacgcctattgggagcccaatacgctgcggtgtctggatcgtcgtacaggtcgcgttattacgccctaatgcaggataactaaaaggaagtgtaaggatacagtatgacaagtgactacaaggtcagactgcgcccgcttgagcgtgaagatttacgatttgtccaccagcttgataataatgccagcgttatgcgttactggtttgaagagccgtatgaggcttttgtcgaactgtcggatctctacgacaaacacatccacgaccaaagcgaacggcgctttgtcgtcgaatgcgacggtgaaaacgccgggctggtagaactggtggaaattaaccatgtgcatcggcgggcggaatttcagattattatctcgccggagtaccagggaaaaggcctggcgtcacgcgcggccaaactggcgatggattacggatttaccgtactcaatctctataaattgtatttgatcgtcgataaagagaatgaaaaagcgattcacatctaccgtaaactcgggtttagagtagaaggcgagctgattcatgagttcttcattaacggcgaataccgtaacaccatccgcatgtgtatcttccagcagcagtatctggatgaacataaaacgtccggttctacgctcctgaaacccaccgcgcagtaaacgcggcgcggtagtcacggagagtcgcaccgcgcccggtttagtagtaatcgatacgatttttaatggtgtaatggtggaacactgccggcttaacgctctcatcgacgataacaagccggcagtcaacagggttcgcgtacgcatcatattcgcagctctgtgtgacgttgccgacctgtcgatcatccacccggctgactgccgtataatccagctttttacgcgggtccgcggagggttttgccgtcacagagagcgtattctgcgagtttatggttgtcttacctaacggatagccttcgctatcatagcggtactcgaccttcatctctttgcccgtcgccgataccacaaaaccgttgtcgtccgtttcccaggtcacgcccgccgaaggcaacgccgccagctggcacttcccctgtaactgcacctttttttccagcgtctgagcatcccggtaataattggcatccagcacgagtgccagccccgtattattctccagatcgtgtaactcaagcgtatcaaaacagccttcctgtgaaagcgtaccggtgacctgcttcgccacttcgccattctcactcatcaatgtctggctgaaatcctttaccggaccacgtaatggatcaaaatcaaattcgttcgaaaaactggccatttccggcgtaaaagactcaagggatttcgggttatcacaacctgccagtatcatgcacaataacgtcagtaaaaggggtttcttcacacgtatcaccaggatgaaaagatatttatcatcatattagcaaatacagttatttacacgaaaaatgctaagcttagaacatcgtcattaatcacaggagttcatgatgaaaatcgcaactgcaatagccgctctggcgttagttagcgccccctcgctggtgatggcggcaccgggatcgtgcgagagagtaaaaagcgatattgaacaacgtatcatcaataacggcgtgccggcggataattttacgctcactatcgttcctaacgaccaggccgatcagccggactcacaggtggtgggccattgcgcgaacgacacgcataaaattctttatacccgcaccagcagcggcaatgcgccagccaatacctctcccgctcaggacggttcatccgccgaaccgcaataacctcctcctgccctccgggtccggagggtaacgctctttgacatggattaataatccttactcccaaaggggtaaactcattacatcattagcatgttaataatttcgttatagttatcaatatatagcgaaataataacgacaatggagtgagtgatgcccggagaaaagcaacaaacaggcgttagccgcaggacgttagtgaaatcagcggcgcttggctcactggcgctggctgccggaggcgtatctttaccgtttgggatgcgtaccgcggccgcggcggtgcagcaggctatgcgcaacgaagaagataaaatcgtctggggcgcctgttcggtcaactgcggcagtcgctgcgccctgcgtctgcatgtaaaagataatgaagtctggtgggttgaaactgataacactggcgacgatgtctacggcaatcatcaggttcgcgcctgcctgcggggccgttcaatccgtcggcgtattaaccatccggatcgccttaactatcccatgaaacgcgttggccgccgcggcgaaggcaaatttgaacgcattagctggcaggaagcactggacaccattagcgccagcctgaaaaagaccgtagagacctacggcaatgaagccgtttatatccactattcatccggcatcgtaggcggcaacataacccgctcgtcgcctgccgcctcgccggtgaagcgtttgatgaactgctacggcggttcgttgaatcaatacggctcatacagtaccgcgcaaatttcttgcgccatgccctacacctatggttccaacgacggcaacagcacatctgatatcgaaaacagtaaactggtggtcatgttcggcaataatccggctgaaacacgcatgagcggcggcggcattacctggtttctggagcaagcgcgtgaacgctcaaatgcgcgcatgatcgtaatagatccgcgctataccgataccgctgccggacgtgaagacgagtggataccgattcgccccggcaccgatgccgcgctggtggcgggaattgcctgggtattgattaacgaaaatctcgttgaccagccttttctcgataactattgcatcggctacgatgaaaagacccttccggctgacgcgccccccaatggccattataaggcttatattttgggccagggcgaggacggtatcgccaaaacgccgcagtgggcatcgcatattaccggcatccccgccgatcggattatcaaactggcgcgcgagataggcagcgtcaagccggcctacatctgtcagggttggggcccgcagcgtcaggcgaacggcgaacaaaccgctcgcgccatcgccatgttaccgattctgaccggcaacgtcggcattcatggcggtaatagcggcgcacgcgaatccacttacaccattaccattgaacgtctgccggtcctggagaatcccgttaaaaccaccatctcctgctttagctggacggacgccattgcgcgcggcccggaaatgaccgccctgcgcgacggcgtacgcggcaaagataagctggatgtcccgatcaaatttctatggaactacgctggcaacaccctgattaatcagcattcggatattaataaaacccatgaaattcttcaggatgaaacgaaatgcgaaatgattgtggtcatcgacaattttatgacctcttccgcgaagtacgccgatattttactgccggatctcatgaccgtcgaacaggaagatatcatccccaatgattacgccggcaatatgggatatctgatttttatccaaccggcgacgacgcctaagtttgaacgcaagcccatctactgggtactcagcgaaatcgccagacgcctcggcgacgatgtgtatcagcggtttaccgaaggccgtacacaggcgcaatggctgcaatatctgtacgccaaaatgcaggcaagagatccggcattgcccgcgtatgacgatctgaaaaaaatgggcatctataaacgcaaagatcccaacggccactttgtcgcctataaaaaatttcgtgaagatccgcaggccaatccgttaaaaacgccgtccggtaaaatcgaaatctactcaagcaaactcgctcacatcgccagtacctgggagctggcggaaggcgacgtgataagcccactgccgatttatacccctacttttgaaggatgggacgatccgaagcggagcaccttcccgctacagctgtttggctttcactataaatcccgtacccattcaagctacggcaatattgatgttctgcaggccgcctgtcgccaggaggtgtggataaatccgctcgatgcgcaaaaacgtggtatcgcgaatggcgataaggttcgcgtctttaacgatcgtggagaggtgcgtctacccgccaaagtcacgccgcgtattctgccgggcgtcagcgcgatgggtcagggcgcatggcataatgcggatatggctggcgataaaattgaccacggcgcctgcatcaatacgctcacgacgctgcgtccttcccccctggcaaaagggaatcctcaacatacaaatctggtggaaatcgaaaaaatctaagccgcctgctccgggacgtttttacgcgcccggagctccccgttttgcgaacacaacgacatttaaaactcttttttggatgagcatagtgagctgttatgaaaatcaccaaccctgaggcattaatggcggccagtatcagccgacgaagcctggtgaaaacctccgctatcggtagccttgcgcttgccagtagcgctttcacccttccgttctcccgcatcgcacacgccgcagcagacctcgcatccggcaatgtggcagaaaaagcggtctggagttcatgtaccgttaactgcggcagccgctgcctgctgcgcctacacgtaaaagatgacaccgtatattgggttgaatcagataccacgggcaacgatgaatatggcaaccatcaggtacgcgcctgcctgcgcggccgttctattcgtcgccggatgaatcatcccgatcgcctgaaatatccgatgaaacgcgttggtaaacgaggagaaggcaaattcgaacgtatcagttgggatgaagcgttggataccatcggcgataacctgaaacgtatcctcaaggactacggcaacgaagcggtacatgtcctttacggtaccggcgtggacggcggcaatattaccaattctaacgtaccgtatcgcctgatgaacgcctgcggcggctatctcagccgttacggtagctacagcaccgcccaaatcagcgcggccatgagctatatgttcggcggcaacgacggcaacagtccggatgatatcgccaatacaaaactggtggtgatgtttggcaataaccccgcggaaacacgtatgagcggcggcggcgtgacatactatgtcgaacaagcgcgcgagcgctccaacgcccggatgatcgtgattgacccgcgttataacgacactgccgccggccgcgaagacgagtggctgccgattcgccctggtaccgatggcgcgctggcggcggcaatcgcctgggtgctgattaccgaagatcttattgataaaccgtttctggataaatactgcatcggctacgacgaaaccactctgcccgcctcggccccgcgtaacgcgcactataaagcctatattttgggtcagggcgacgacggtattgctaaaacaccgcaatgggccgcgcagattaccagtattccggcggaaaaaatcattcaactggcgcgggaaatcggctcggcgaaaccggcttacatttgccagggctggggaccgcaacgccactctaacggggagcagaccgcacgcgcaatcgccatgctgtctgtactcaccggtaacgtcggcataaatggcggtaattccggcgtgcgcgaaggcacctgggatctgggcgtcgaatggttttctatgctggagaacccggtaaaaacccagatttcggtctttacctggaccgacgctatcgatcatggcgcggaaatgaccgccacacgcgacggcgtgcggggaaaagacaagctcgacgtgccgatcaaatttttgtggtgctacgccagtaatacgctgatcaatcagcatggcgacatcgcccacacccacgaggtgcttcaggacgacagtaaatgtgaaatgatcgtcggcatcgagcactttatgaccgcgtcggcaaaatattgcgacattctgctgcctgatttaatgccgaccgagcaggaagatctgatttcccacgaatccgcaggcaatatgggctatgtcattcttggtcagcccgccacctcgccgaaatttgaaagaaagcccatttactggacgctcagtgaagtggctaaacggcttggtccggacgtataccagaccttcacagaaggccgcacgcagcatgagtgggtcaaatacctgcacgcaaaaaccaaagcgcgtaacccggaaatgccggattacgaagagatgaaacagacagggattttcaagaaaaaatgcccggaggagcactacgtcgctttccgctcattccgcgaagaccctgccgccaacccactgaaaacgccgtccggtaaaatcgaaatctattccgagcgtctggcaaccctcgccaacacgtgggagctgaagaaagatgagattatccatcctttacccgcctatacgccaggctttgacggttgggacgatccgcttcgtcagcgctacccgctacagctaaccggcttccactataaagcgcgtacccactccagctacggcaatatcgacatcctgcaacaggcgtgtccgcaggagatctggatcaacccgattgatgcgcaagcgcgcggcattcagcatggcgacaccgtgcgggtctttaaccagaatggagagatgctcattctggcaaaagtcacgccgcgcatattgcctggcgtcaccgctatcggccagggcgcctggttaaatgccgacatgtttggcgacaaagtcgatcgcggcggctccattaacattctgacgtcgcaccggccttccccactggcgaaaggtaatccgtcacacagtaatcttgttcaggttgaaaaggcgtaaggagtaaccgatgacaacccagtatggattttttattgattccagtcgttgcaccggttgcaaaacctgcgaactggcctgcaaggactacaaagatctcactcccgacgtcagtttccggcggatatatgaatacgcaggtggcgactggcaggaagataacggcgtctggcaccagaacgtctttgcctattatctctccatttcatgcaaccactgcgaagacccggcctgtaccaaagtctgcccgagcggcgcgatgcacaagcgcgatgacggttttgtggtggtgaacgaagaggtctgtatcggctgccgctactgccacatggcctgcccgtacggcgcgccgcagtacaacgccgccaaaggtcatatgactaagtgcgacggctgtcatgatcgcgtcgccgacggcaaaaagccgatttgcgtggagtcctgcccgctgcgggcgctggactttggcccgatagacgaactgcgtaaaaaacacggagagctggctgccgtcgcgccgttgccgcgcgcgcatttcacgaagccgaatattgtgattaaaccgaacgccaacagccgcccgaccggggacactaccggttatctggccaatccgaaggaggtataagatgggaagtggatggcatgaatggccgttgatgatcttcacggtctttggtcagtgcgtggtcggcgcgttaatcgttagcggactgggctggctgacggcaaaagacgataccatcgcccgtcagcgcatcgtgcgtagcatgttttttctgtggctggtgatgggactaggattcctcgcgtcgattatgcatctcggctcgccgatgcgcgcgtttaactcgcttaaccgcgtaggcgcttccgcactgagtaatgaaatcgccgcaggatcggtgttctttgccgtaggcggcatctggtggctggtggcggtactcggtaaaatgcccccggcgctgggtaaagtgtggctgctggtcagtatggcgctcggcgttgcattcatctgggcaatgacgctcgtttatcagatagataccgtgccaacctggtataatggctacaccacgctggcctttttcctcacggcattcctgtgcggcccggtgtttgcggcgctactgctacgcatcgcgcgcgtcccattttgcagcgtgacgtttgccagtattagcggcctagcattggtggtgtgcgtggcggtcatcgtactacaaggactgtctctctcaaccattcacagttccgtgcaacaggccagccatctcgcgccggattacggtatgctacaggtctggcgcattgtcttgcttgccgccggattaggctgctggctatgtccgctaatccgtcgccgcgaaccgcataccgttggtttgctgctcggtgtcgtgctggtgctggcgggcgaaattattggccgcggacttttttatggcctgcatatgaccgtaggtatggccatcgcaggttaatttatgcgtgcggggcgacccgcacctttcgggattgtttgaatgaccacttttttacaacgtgatgatttttcagtaacggcgcgtgttcttggcgcgttgttttattattcgccggaaagccacgaaaccgctcctctggttcaggcgctattaaccgacgactggcaggcgcagtggccgcttgatgccgaggcgcttgcgcctgtggcggctatgtttaagacccacagcgaagagtcgttgccacaggcctggcagcgtctgtttatcggcccttacgctctgccgtctccgccgtggggttccgtctggctggatcgtgagagcgtattatttggcgattctacgctggcgctacgtcagtggatgcgcgaaaacggaattcagtttgaaatgcaacaaaacgagccagaagatcattttgggtcgctgttgctgctggcggcctggcttgccgagaatgatcgtcatcatgaatgcgaacaactcctggcctggcatctgtttccgtggtcgtcccgctttctggacgtatttatcgatcatgccgggcatccgttttatcaggcgttggggcaactggcgcgtctgactctggcgcaatggcaagctcaacttattattcccgtcgctgtaaaaccgttattccgttaatccccacaaaaggcaggattttacctgccttttctcccattgcggcctatttttatctacaaaaagtgacaacgtcacactacatttctgtttttaagataattctttatcgtgaatgtttacgctaagccgcataagggcaaagcataattgttaatagatgtttaatagtgttaaacatcacgcttcgctggaatccttcccaacctgttgctatagctcaaagtaccctgccggaacatggcataacaacacgcgactcttaacgtcgccataacacatgcaaacagggagacacaccgcaatgcacaccctcaccctaaaacgtgtacttgggttcactatcgtcattttgctgttactggcgctgtttatctggggaatcggtctggagacgctgaaagcgcgtcaggtcgatctgctgtatctcgggcaacggcatttgatgctggtctttacgtccatgttttttgctttactggtcggtatcccgagcgggattttactcagccgacctgcggcaaaaggatttgctgaatatgtcatgcaaatctttaatgttggtaataccttgccgccgctggccgttctggccttagcgatggtgattatcgggatcggcgatacgcccgccattgtcgcgctatttctggcctcccttctgcctatcgtccgcaatacctatgcgggcctctgttccgttcccgcctcactgattgaagcggcgaacgggattgggatgacaaaatggcagcggcttcgtcaggtagagctacctaatgcgtggccagtgatgctgtccggtattcgcatcgcgaccgccatcaatgtcggcaccgcgccgctggcctttctgatcggcgccagcagctacggcgagctgattttcccgggaatttatctcaacgattttccgacgttgatcctcggcgcaacggccacggcgttattcgcgctgattcttgacactctgcttgcctggtttgggcgacgccttagccctcataccgtctgaacgcataaataacaataaggagcgttaaatgagattcaaaaaacacctgttgggatggcttgccgcaacgctgttgttcagtagccagacgcaggccgcgccgctggttctcgccaccaaaagctttaccgagcagcatattctttccgctatgaccgttcagtatttgcagaagaaaggctttcaggttcagccgcaaaccaatatcgccgcggtgatttcacgtaatgcgatggtgaataaacaaattgatattacctgggaatacaccggtacatcgctgattattttcaaccgtatcgataagcgcatgagtccacaggaaacctacgacacggtaaaacgcctggatgcgaagctgggcctggtatggctcaaaccggctgacatgaacaatacttacgcgttcgcgatgcagcgcaaacgcgccgagtcggaaaatatcaccaccatctcgcaaatggtggcaaaaatcgaacaggtccggcagaacgatcctgaccacaactggatgctcggtctcgatctggaatttgccgggcgcagcgatgggatgaagccccttcagcaagcctaccaaatgcagcttgatcgcccgcaaatacgacagatggacccagggctggtctataacgccgttcgggatgggctggttgacgccgggctggtctataccaccgacggacgggtgaaagggtttgatctgaaagtgctggaagatgataaaggcttctttccaagttacgctgtcacgcccgtggtgcgtaaagaggtgctggaagccaatcctggccttgatgacgccttaaacaccctttccggcctgctcaataacgatgtgatatcgaccctaaacgcccaggtcgatatcgagcatcgcacgccgcaacaggtagcccatcaatttttgcaggacaaaggtctgctgtaaggagcgcctatggatacgatacattatatgctggataatgcaggctatctcgccagccttacctttcagcatctctggctggtcgcgctggccgtcggtctggcgattatcatcggcgtaccgttaggcgttttgattgtacgccacaaatggctggcaatgccggtattgggcgccgccacgctacttcttaccattccgtctatcgcgctgtttggattaatgatcccgctcttttcgctgatcgggcatggtattggcgttctgcccgctgtgacggccgtttttctctactctttactgccgattgtccgtaatacccatactgcgcttgatagtttgccgcccggtctgcgtgaagcgggacgcggcatcggtatgactttctggcaacggctgcgctgggtcgaaatcccaatggccctaccggttattttcgggggtatccgcaccgcggtagtgatgaatatcggcgtgatggcgattgccgcggtgatcggcgctggtggtctggggctgctactgttaaacggcattagcggcagcgatattcgcatgttaattgccggcgcgctaatgatctgtctactggcaattgtacttgactggctgttgcatcgtctgcaagtcgtactgacacctaaggggatacgataatgataaaactggaaaatctcaccaaacaatttgtacagaaaaagggtcagccgctaaaagccgtcgacaacgtcaacctgaacgtgccggaaggcgaaatgtgcgtcttactcggtccctccggctgcggcaaaaccaccacgttaaagatgatcaaccggctgatcgcgcccagcagcggtaatattcttatcaacggcgagaataccaacgatatggatacggtaacgctacgccgcaatattgggtatgttatccagcagatcggcctgtttcctaatatgacgattgaagaaaatattaccgttgtgccgcgcatgttgggttgggacaaagcgcgctgtaagcaacgcgccgaagagttgatggacatggtggcgctggatgccagaaaatttctgcatcgctatccaaaggagatgtccgggggacagcaacagcgtattggcgtgatccgcgctctggccgccgatccgccggtactgctgatggatgagcccttcggcgcggtggaccccattaaccgcgaagtgatccagaaccagtttctggatatgcagcgtaagctaaaaaagaccgtgatgctggtcagccatgatatcgacgaagcgctaaagctcggcgaccgtatcgccgtgttccgtcaggggcgaattgtacagtgcgccagtcctgatgaactgctggccaaaccggctaacgagtttgtcgggtcgtttgtcggtcaggacagaacgttaaagcgtttgctactggtctccgcgggcgatgttaccgaccaacagccaaccattaccgcgcggccttccatgccgttaagcgaggcattcggcattatggatgatcacgatattcgcgccattaccgtcattgacaacgacggtaagccactgggatttgtgaagcgccgggaagcgcggaacgccagcggaatctgcgccgatatcacccatcctttccgtattacgggcaaagcggaagataatctgcgtattgtgctgtccagattgtacgaaagtaatactagctggatgccgatcgttgatgaagacggacgctataacggtgaaatctctcaggattacatcgccgattatctcagctcaggccgcacgcgtcgggcgctaaatattcacgaaagcagctaacgttgccgccggatggcctctcgctatccggcagtatcattattgtacgcaatattatatcgcacatagtgcttttgcgtctgacgccatttccccgcagaataggctatcctgaaactccctatttacccgctcatgcatcgtttacacgcttacccggatctgcgcgcgatgtttcgtcgcctgctgatcgctacgctcatcggtattctcgcggcgctggctgtcgccgccttccgtcatgcgatgcaattgctggagtggattttcctgagtaatgacaccggcagtctggtgaatgcggctgaggggctttcgccctggcgacggctgattacgccagcgcttggcggcctggccgctggtctgttgctgtgggggtggcaaaaaatgaaccaacagcgcccccatgcgcccactgactatatggaagcattgcaaaccgacgggcaatttgacgttggcgccagtctggtgaaatcgctggcctcgctgctggtcgtggtcagcggcagcgcaattggtcgcgaaggcgcaatgatcctcctcgccgcgctggcggcatccagctttgcccgacgcttcacgccgcgtgaggaatggaaattatggatcgccagcggcgccgctgcgggcatggcgggcgcttaccatgcgccgctggcgggcagcctgtttatcgcggaaatcctgttcggtaccttaatgctggcttccctcggcccggttgtcgtttccgccgtcgtcgccctgctaaccacccatctattaaacggtagcgattcactactctataccgtacatctgaccgttgatctccacgcgcgggagtacgtcatgatagtcagtaccggcctggtcgccggtctgtgcggtccattactgatgtggctgatgacggccagccataatagtttcttacgcttaaaactgtccccgccctggcaactggcgttgggcgggcttattgtcggattactgtcgttactcacgcccacggtatggggaaacggctatagcgtcgtacaatcatttttgctctctccgccgctattctcgctgattggcggaatttttgcgtgcaaaatcctggcggtgctcgccagcagcgggtctggcgcgccgggcggcgtctttacgccaacattatttgtcggattatcaattggaatgtttctgggtcggatatggggattctggctgccaggctcggatgaaatagcgattttattggggctggcgggtatggcgacgctactggcggcgacaacccatgcgccgataatgtccaccctgatgatttgtgaaatgaccggcgagtatcagttactccccggtctgctgattgcctgtgtagtcgcgtcagtgctctcgcgaacgttacgccatgattctatctaccgccagcacgctgccgagcattgacaaacgaatatactgccccagctcacgctgctcggcgcgcggcaggtacggtagctcgccaatcagcggcgctggcagttttttcccaagcacatcaataatttcagcataatgcgccaggccaggattgatacgattcgccacccagccaattaagggcagtccatcattagcgacagcttgcgcagtcagtagcgcatgattaatgcacccctcctgaatccctaccaccatcaataccggtaactgttcctgtaccacccattcagacaatggacgtaaatcattcatcaaactacgccagccaccagtgccctccacaacaacgtggtccactttatcgctcaggctcgccagaccgttggacagcaaggtgtaatttataggacagctatgcgcgacgctgctttcttcttcgcttaacgcgatcggattaatcgcctcatacggcaactccagcgaagagacgctttgcaataccagcgcatctttgttgcgcatcccttctgcagtctctttgctccctttagcgacaggtttataccctgcaacgctcttaccactcgacgctaacgcttgtagtaatgcgcgggaaaccaccgtcttcccaacagaagtgtctgtacctgtaataaagaaacgcttcagcatcactaactccaccgttatgcttcgaaaatataagccaggaaaataatacagtggagaaagtctaagatatggcaagggcaatcagcttgagttagcgcaaatttttgtacaacagttaaaaaatgttaaccctgtaatagacgaatcaacaaagagccgttatacatcgcgtcttttaccaacgccgccccggccatcgtaccctggttggtaaactgcgtgctttccacaaccgtattcctgctgtaggcgggcagcgcctgttgacggatactgtcagcaatggctggaaaaaggatatcagccgctttacttagcggcgaaccaataagaattttttgcggattaaataaattcaccatgatagccagaatgcgtccgacatgcgcgccaacgccgctaataatatcttttgctaatagatctccctgcatcgccgcctgacacagtgaatctaccgttaacggctggccgtgcaacattgaactcatcgactgattaagccgaagctgcgtaagttccagcacgctatcgacgctggcgatggtctccagacagccatgattaccgcaataacagcgcttaccataaggatcgacctgggtatgcccaatctctaccagactgctactacccgcatgaagcaaatgaccgtcggtgataacgcccgcccccacattatgatcaatcaccacctggataacgtcgcgcgcgccgcgtgaggcgccaaaaagcgcctctgccatcgtccaggcgctaatatcatgctgaatgtaaaccggtacgccggtgtgccgctccagcgcatctcccaaaggcatctctttgacatcttcgtaatacggcatccggtgcacaacgccgttttcggtatcgataatgcccggtaacgtaatggcaatggaggtcagacgctccagtttctgctgatggcgggtaaaaaaccgatcaacgtgcgtaataattcgctcaagcaacggcgtagcttcgtttaacggcagcgccagacactcttctaccaccagtttgctgctaagatcgcgcagtgcaaggaaaatttcgccacggctaatacgaatagataaatagtgccaggcttccgtttccaccatcagccctacggcgggacgtccgcgactgcccgcctctttaatttcaagttcctgaaccaaatgcgcttccagcatttcgcgaacaattttcgtaatactggcaggcgccaactgcgccagacgagacaggtcaattcgcgataccggtccgagctgatcaatcaggcgatacactgcgccagcattggtctgcttaatttgatcgatatgcccaggctgactatcagcaaccaccgctcactccctttattttcgcgctccgaaataatctgtgtgctatggtgaaacacttcaatactcgccgtcaactttttgcttagccgtgtgattaactgcacattttcaccctttttaagcgtaattaatcccgtcgggcagccagtaatagcagttggcaaaaccgctgtacggcatgactctgttcatgatgctttggccataccagccacatttcagatacggcgtcctcttccgccaggggaacccagcgcatctcgctcatctgtacacgcttaaaggatgccggcagaatcgagacacccagtcccgccgctaccagaccgataatggtcattgcctcgccaacctcctgcgtgatggtcggcgacaggttatagcgccgcatcaggccgaggatatcgtcgtagaggcccgtcccgacatgcggatcgaaaaagacgaaaggttcttccgccagttctgtcagactgacgaccggcttttgcgccagccgatgttcgcgcgggatcatggccataagcggctcatgcaaaatcacctcgcgattaagtgtgtcgggcaacggcgtattccgcagtaagccaatatccagtacgccttcgttgagcggcgcgatttgctcacgcgtattcatttcacgcgtttgcatatgcacccccggataggactggcggaacagcgaaaaggtatgcgataccgcccgaataaaaggcgctgaagacgtaaagccaatacggatttcacccgcttcgccctgatgcaaccgctcggcgcgagcggcggcgtcgtttaccagactcaggatgtgtcggctatccaccagaaactgtcgcccggcggcggttaacgctacgctgcggttagtccgcgccagtaatcgcgcgccgacctgctgctccagaatttgtatctgctgactcagcggcggctgcgagatattgaggcgcgcggcggcgcgaccaaaatgcagctcttctgctaccgccacaaagtaacgtaaatgacgtaattcgatattcatatttttaacgtcttatttgagacaattaatatattagacagaatattttgctttttctatgctttacatgtcggttatacccgtctcctgttgacggagatgtaaagcaaggatttaacgtgagtcgtacaactattctcgatgacgccacggcgagcgatatcgatgaacaacgccattctcagccggttcaatttattaaacgcggtacagcgcctttcatgcgcgtcacgctggcccttttttccgcgggcctggcgactttcgcgctcctttattgcgttcagcctatactaccggtactttcccaggagtttggcgtctcccccgccagcagcagcgtttcactttctatttctaccgccatgctggctatcggcttactttttaccggcccgctttctgatgcgataggccgtaaaccggtgatggtcaccgccttgttattagcctcctgctgcacattgttatcaaccatgatgaccagctggcatggtattctgattatgcgcgcgctgatcggtctgtcgttaagcggcgtcgccgcggtgggaatgacctacctgagcgaagaaatccatcccagctttgtcgctttctctatggggctttatattagcggtaattccatcggcgggatgagcgggcgtttattaagcggcgtcatgaccgacttttttaactggcgcatcgcgctggcggccatcggatgctttgcgctggcgtccgcgctgatgttctggaagattttacccgcctcgcaacatttccgtcccacgtcgctacggcctaaaacgctatttattaatttccgtctccactggcgcgatcgggggttacctctgctgtttgcagaaggttttttactgatgggcgcgttcgtcaccctgtttaactacattggttatcgcctgatgctctccccctgggaattaagccaggccgtggtcggactgttatccgtagcctatctcaccggcacatggagctcgccgaaagctggcgccatgacctcacgctatggccgggggccggtgatgctgttctctaccgcagtaatgctgggtgggcttttactgacgctttttacctcgctttggctgatttttgctgggatgctgcttttttccgccggctttttcgccgcgcactccgtggccagtagctggattggcccgcgtgcgcgtcgggcgaagggacaggcctcgtcactttatcttttcagctattatctggggtccagtattgccgggacgctaggcggtgtattctggcatagttacggctggaacggcgtaggtggttttatcgcgctaatgctggtgctggccatcctggtcgggacgcggttacatcaccgtcttcatgcctgaaaagaaatattccggcgatagcaacgtgcgctatcgccgggctggtttcacgccacgactcactgttcaccatagacctgtcaggcttgatacgcccataacttctctgattgcatccagcgccagaagcgtaaataccacccagattatcggattcatatacggtgtgcctgttattctggagggcggatattaccgactctgcggccaaaaataacggccggtaacgtaaagctacctattatggtgggggctgacatcgcgttaccgggggattgtacatagcgttacatgccgaaaccaatcactcacggaagccttttgataacagcgatatagtcatttcaccggccccgcagtggggttgaatgaaaaccaaatcgagggtatcaaaatgaaaaaagtattagctctggttgttgccgctgcaatgggtctctcttccgcagcattcgcggctgagactgcaacgcctgcgaaaaccgcagcgcctgccaaaacaacccagaacacccagcaccacaaaaaacagcataaaaaaaccgttgagcaaaaagcgcaggcggctaaaaagcaccagaaaaaaggtggtaaagcgccagccaaaaccccgtcaaaaccaactactcaaccggctgcgtaagtcgtaacatgctgcggcgcgcccccgcgcccgtttttacggcgctaaattgttctggtttagcgccgccttccgggagggcaaaaaagtgtctcgctaccgctttgagctcattcttatcgtgcttattttatgcgccgctattgccacgcatttctatctttcctgagtgtagttatctgattttactcccactttcttaccgtcacgtctatagtagtactgagggtttgttgttaataatcataattacccaccagagtgtgatatgcataaaaccattgctgtattactgggcatagtgtgttttttaccggttatggcgaaagccaggggggctgaaacagacgccacggatgccagcgacgtcaaaacgcttttttttaaccatgatgatcgggtgcccgtcgccgatcctacccaatcgccgtgggatgccatcgggcaactagagaccgccagcggtaatttgtgtacggcaacgcttatctccccgcatatcgccctgacagcaggtcactgcctgctaacgccaccgaaaggaaaaccagacaaggcggttgcgctgcgttttgtggcgcgaaaaggagtatggcgctatgaaatccacggcattgaaggccgcgttgaaccgtcgctgggccgacgcctgaaagcggatggcgatggctggattgtgccgcctgccgcggcaagctgggattttggtctggtaatattgcgctacccaccttccggtatcacgccagtgcctttatttaccggcgataaagcggcgctcactgcggcgttgaaagccgcagaccgaaaagtcacgcagtccggttatccggaagatcatctgaatgcgctctattcccatcaggattgcgtcgtgaccggctgggcgcagaatgccgtactctcacaccagtgcgacacgttacctggcgacagcggctcgccgctcttattgcacacggatagcggatggcagctcattggcgtacaaagctccgcccctgcggctaaagatcgctggcgcgccgataaccgcgctatatccgtcaccggctttcgcgataagctgaaagctctggcgcaggattaatgcgggaatcgctgcctgaaccgacaggcagcgatcgtctcaggcaaatttgatcatgaccattccggcgagcagcaatatcacgccaacccagcctttggggtttaagcgctggccgaagagcacccagcccgccgccagcgtggcggcaataccaaaaccgccccataacgcatacgccaccgacaggtctatcccttttaccgcctgggaaagcgcgctgaaggcggccagaacagcggcaagcgataagatgccatagcatttacggcgaaagccgtccgaaaatttcaacagtacgttagccgcgatttccagcattattgccagcccaagccaggcgccgtgtatccattcaaattgttgcacgagtcgcctccttcaccggtttgccgggtttacgcgtccctgatttgatcaatactatgccggcgaccagcgtcagcaagccggcaatcttcatggttgataatgcttcatcaaatagcagcacgctaaaaatggtaataaataaaatgccgatcccttcccataaggcatacgctacacccagggcaatcttttttaccgcaaaagaaagaaatatatatgacagcgtgatcatcaccagcattaaaataaaacccgcattgccattacccacgctagcccatttcattgagagcgtgccggtaatttcagtcgcgatagccagagctaataaaatccagtaaaacatgacacttctcctgcatgagaatatactctttcgagtctgctgcacgcagcaaactaaaaaataaaatcagttagcacagcgcattgcgccagctcaggcagaagtgagagactaaagtgcgttacgccagtgctgctcgccgataagcaggaaaaaggaggtagagtgaagatgcgtttgcgtggagaaaaaagcgctgaacatattgtccataatattacaattatccgcagtgttgcttctcgtcatcgcggatgataattgtcctcggtagttgaacacgcctgatttgtatcataagccaggaattaactcaaaatattttcacttctttacctgaagtatttgattttaaccagaacaggtcgaccgacatcacattattattcgtgtcggcatcagaaaacagggactgatatggcaaaaccgatcatcacgctcaatggtctaaaaatcgtcattatgctgggaatgctggtggttattctgagcggtatccgcttcgccgcagatatcattgttccctttattttggcgttatttattgcggtcgttctcaatcccgttgtgcaacggatgacccgatgtcgaattccgcgcgttatcgccgtgtcattgctcattgtgattattgtcatgctaatggtactgctactggcctatttggggacatcattaaatgaactggcccgtaccctaccgcagtatcgctcctcattggtgataccgttgcaacgtatcgaaccgtggttgcagcgagcaggcattggcgtgtcggttgatgagctggcgaaatatatcgatccaaacgccgcaatgactctggtaacgaacctgctcacccagctgtccaatgccatgtcgtccatctttttattgttattgaccgtggtatttatgctgctggaggttccacaattgcctgaaaaactgcagcagatgatgagccgtccggtggagggcatggcggcaattcaacgcgcgcttgatagcgtttcccattatctggtgctaaaaacagcgatcagtatcgtgacgggactggtcgcatggggaatgctggccgcgctggatgtccgcttcgcctttgtctggggactactggccttcgcgctgaactatattcctaatattggatcggtgctcgctgccctgccgcccattattcaggtgctggtatttaacgggttttatgatgcgctgctggtgctggcaggctatctgctgattaatctggtcttcggcaatatccttgagccacgaatcatgggacgtggtttaggcctttcaaccttagtggtatttttgtcgttaattttctggggctggctattaggtccggtgggcatgctgctctccgttccgttaaccatcattgtcaaaatcgccctcgaacagaccaccggcgggcagagtatcgccgttctgcttagcgatttaaacaaaagataaaatgcaatacatacacaaaatcattcaagatgcctcgcggcggcaagggaagaaatccccgggagcatagataacgatgtgaccggggtttctgagcgcagccaacaaagaggcagcgtaaaggatgaagtgtataaaaacggcctccgaagaggccgccgcacgtttaaaagattaaagcgctttcagaattgcatccacgctggctttggcatcgccaaacagcatttgcgtattctctttaaagaacagcgggttctgcacaccagcataaccagtattcattgaacgcttaaagaccacgacattctgtgctttccacacttcgagaaccggcataccggcgatcgggctgcggggatcgtcttgcgccgccgggttcaccgtatcgttcgcgccaatcaccagcacggtatcggtatcggcgaaatcatcattgatttcgtccatttccagcacgatgtcataaggcactttcgcctctgccaacagcacgttcatatgccccggcaggcgacccgccaccggatgaatgccgaaacgcacattgataccgcgcgcacgcagtttttcggtgatttccgccaccggatactgcgcctgcgccaccgccatcccgtaccccggcgtaataatgacggagtgggagtttttcagcatctcagcggtctcttccgccgtgatttcgcgatgttcgccagcttcctgatcgtcgcccgttgaggagccgtcagtaccgaacccaccagcaataacgctgatgaaagagcggttcatcgctttacacataatgtaagacaggatcgcgcctgacgaaccgaccagcgcgccggtcacaatcagcaaatcgttgctcaacatgaagccagccgccgcggcagcccaaccggaataggagttcagcattgaaacaaccaccggcatgtccgccccgccgatagaggcgaccagatgccaaccaaacgccagcgcgataatggtcatcagcagcagcgccagaacctgtagacccacgctttcggtgcggacaaaaaccagcagcaacaggaaagaaacaaccagcgccgccaggttcattttgtgacggttaggcaacatcaacggcttagaagagattttgccgcgcagtttaccaaacgctgcgatcgatccagtgaaagtgactgcgccaataaagataccgaggaagacttcggtcagatgaatattcaccagcaccggcgccagactggcgtcatggtacagatagctgttaaagccaaccagtaccgccgccaggcccacgaaactgtgcagaatcgcgaccagctccggcatctcggtcatctcaacttttttcgccatgcggatgccaatcgcgccgccaataatcatggcgaccagaatccatgccacgttgccggtatccggcccgaaaatggtcgccagcaacgcgatcgccatcccggcaataccgaagttattcccctggcgggacgtttcatgctttgaaagcccggcaagactgaaaataaacaggatcgcggcaacaatgtatgcagctgtaactaatcctccagacatgtgttaccccttagtttttccggaacattttcagcatacgctgagtcacggtgaagccaccgaaaatattaatgctggcgataagcaccgcgataaagctcaggaagctgacccagccgccctgaccaatttgcaataatgccccgacaacaataatccctgaaattgcgttggtcaccgacattaatggcgtatgaagcgcatgagacacgttccacaccacgtaataaccaaccacgcaggcgagcgcaaacacggtaaaatggccgaggaactcttttggcgcgacatcggccagccagccaaaaagaatgatcgccagcgccattaacgcatacttccgccagggtgaagcgggcttttccggctcttttggcgcaggtgctgctttaggcgcggcctgtggctgcgcggaaacctggattggcggcgcaggccaggtaatgtcgccgtcacgaatcaccgtcacgccacggatcacgacatcgtcaaaatccacgtcaatattgccgtctttctctttgcacagcagcttcagcaggttaaccaggttggtgccataaagttgggatgactgcgtcggcaaacgccccggtagatcggtgtagccaatcactttcacgccattgtccgtcgtcacaacctgattagcgacggtatattcgcagttaccgccgttctgcgcggccaggtcgacaatcacgctgccggccttcatagaatcgaccatatcgcgggtaatcagcttcggcgcaggtttgcccggaatcaacgcggtggtaacaatgatatcgacctctttggcctgggcggcaaagagcgccatttccgctttgataaacgcctcggacatcactttggcgtaaccatcgccgctaccggcttcctctttaaaatccagttcgaggaactcagcccccatactctggacctgctctttgacttcaggacgagtgtcaaacgcgcggacaatcgcccccaggctgtttgccgcgccgatagccgcaagaccggcaacgcccgcgccaatcaccatcaccttcgccggcggcactttcccggcggcagtgatttggccggtaaagaagcgcccaaattcatgcgcggcctctacaatggcgcgataacccgcgatattcgccattgagcttaacgcgtcgagcgattgcgcgcgggaaatacgcggcacggagtccatcgccatcaccgtaaccttacgttcggcaagtttctccattaacccaggattttgcgcaggccagataaaactgaccagcgtagtcccggggttcagtaaagcgatttcctcttcttcaggcgcattaaccttgagaataatttccgactgccagatagcattgccgtctacaatatccgcgccagcctgcgcaaacgctttgtcgtcaaaacttgccagttgacccgccccgctttcgatagcgacgctaaaccccagcttcagtagctgctctaccgttttcggcgtcgcagcgacacgggtttcattgggtaaccgctcttttggtatgccaattcgcataaatgttcccttccatcgatatttttgatgatggtttgtcagtaagcgcgagaagcgtacgcctgcccgcgtttgaggtaaatgttaccccagcagaataaaaccgttacaaactctctataacctactgaaaataacgcctgtgatctagcgccaaaaaacagaattttttatcaaatttgcaaaacatgaacgattcagccgctaagcagccataatgccttgaaaatggcctgcgagggctgataattcgctcaaatttgacagcaaaacatcattaaacccctggcgcgatcaagaaattaacattaaattaacttattaaatttatgcgcttcattagcttagccgcccggacgccgtttttttcgacatatcggcaaatgttatcatcaaagataggatacatgacacgatgcgtgaaaaatcccgcagacatccatatggtttaaatgcaataatcagccacgtttctagtcaataacaataccagtacctggtttgcgcaaggcgaaggattatttttatgaagcttaagaacactctcctggcgtcggctctgctttctgcggctgctttttctgtccatgcagcaacagaactgacgccggagcaagcggctgcactaaaaccttatgaccgcatcgttattaccggtcgttttaatgctattggcgatgcggtctccgccgtgtcccgccgcgcagataaagaaggcgcagcctccttctatgttgtcgacacctcggagttcggcaacagtggtaactggcgtgttgtggcggacgtgtataaagccgacgcgccgaaagccgacgcgcccaaaaatcgtgtcattaatggcatcgtggaattaccgaaagaccaggccgtacaattagaaccgtatgataccgtcaccgttcagggcttctaccgtagccagccggaagttaacgatgccattacgaaagcggcgaaacaaaaaggcgcatacgctttctatattgttcgtcagatagatgcgaatcagggcggaaaccagcgcatcactgcatttatctataaacaagatgcgaaaaaacgcatcgtccagagcccggacgctattccggcagactctgaagctggccgcgccgcgctggctcagggcggcgaagctgcgaagaaagtcgaaattccaggcgtcgccacgtcagcctcgccgagcgccgaagtaggccgtttcttcgaaacgcaatcctccaaaggcggacgttacactgtcacacttccggatggcacaaaagttgaggagctgaataaagcgacggctgcgatgatggtgcctttcgacagcgttaagttcaccggcaactacggcaatatgacagaaatctcctatcaggtcgccaaacgcgcggcgaagaaaggcgctaagtattatcatattacgcgtcagtggcaggagcgcggcaataacatcaccatcagcgccgacctctataaataaggcgcgcgccgccatcaggctttctcgccggatgacggcatacctgccttatcaggcctacacgatcgttcaacggcaggcctgataagccaccatccggcactttctcgcgggatgccagttccgtcaaatatcgcgatgaatctcacttttcgcttttttggcgataaatcttatccaggccgttgcatgcggtcccttctctccgtaaaatcccgcgccttagtggctttcaccatttttatgcgttttgccataataattattcttccaatttcatttttatagctggataccaatggaaaaaaaactgggactgagcgcgctgaccgcgctggttttaagctcaatgcttggcgcaggtgttttcagtctgccccagaatatggccgccgttgccagtccggctgcgttgttaattggctgggccattaccggcgtggggatactcttactggcattcgccatgttaatccttacgcgcattcgctccgagcttgacggcggcatctttacttacgcccgcgaaggcttcggcgaactgattggcttttgttctgcctggggctattggctgtgcgcggtcatcgccaacgtatcctatttggttatcgttttttcagcgctgagtttctttaccgatacgcctgcgctgcgtctgtttggcgacggtaatacctggcaggctattgtcggcgcttcagtcctgctctggattgtccatttcctcatcctgcgcggcgtacaaacggcagccagcatcaatctggtcgcgactctggcgaaactgttgccgctcggcgcgtttattgtgctggctatcatgatgttcaaactggataccttcacactggacttcaccggtgttgaactcggtattcccgtatgggaacaggtcaagaacaccatgcttattacgctgtgggtatttattggcgttgaaggcgccgtcgtcgtctcggcccgagcgaaaaataaacgcgatgtaggccgcgccacgctactggcggttctcgcggcgctgggaatatatctcctggtcacgctgctttctcttggcgttcttgcgcgtccggaactggcggagatgcgtaacccgtcgatggccggactgatggtaaaaatgatggggccgtggggagaaattattattgcagcgggactgattgtgtctgtctgcggggcttatctaagctggactatcatggcggcagaggtgccgtttctggcggcagcctataaatccttcccgggcatcttcgcgcgacaaaatgcgcaaggcgcgccttctgcatcgttatggctcaccaatatctgtgtgcaaatctgtctggtgctgatctggctgaccggttcggactacaacacgctattgacgattgcgtcagaaatgattctggtgccctactttctggtcggcgcatttctgctgaagattgcaacacgtcccctccatcgggcggtcggtatcggagcctgtatttatggcttatggttgttatacgcgtcgggtcccatgcacctgctgctgtccgtcgtactgtacgcgcctggattactggttttcctgtatgcgcgtcggacgcacaagcatgacaacgtgttaaatcgtcaggaagtcgtgctgattggtttattgctggtcgcggcggttccggctacgtggatgctggtgggttgacaacctccccatcgtaatatccgtctgtattacgatggggaaaccacggtctttgccaatattaatgccatttaatccagcaaaaaatcagcagccacgcgcttagcccccagcagaccaccgcaccgccaagcgcgacgggcaggcgcatcacgccgctgaaataccatagcgttgcaagataaatgaaataaggaatgatcgaccacatgctaaagacgatggtggtacgcatcgcgtcgatgccccgctcgctggccacgatatagtgcgcgataagcgcaaacgttggaaacagaggaattaatccggcgatataataatttttcgtttttgacagcagaccaatcaatacgacgaccagcgcccccagggcagctttaatcacgagtcccattaccttgccttaacacgctaataacaacagcgtgtagcataacggaaccgctctcgtttagaaaagatttatggaagggaaaacagaggcggtgtatgttggcgttttctattctccatttataatatgaaccgcattgtatttgttgaagacgacgctgaagtgggttctctcattgccgcttatctggcgaaacatgatattgatgtcattgttgagccgcgtggtgaccgggcggaggatcttatcctcaccactcagcccgatctggttttactggatattatgcttccaggtaaagatggcatgacgatatgtcgcgatttacgccaccgctggcaaggcccgattgtcctgctcacctcgctggacagtgatatgaatcatattctggcgctggagatgggcgcctgcgactacatcctcaaaaccacgcctccggccgttttgctggcgcgtctgcgcttacacctgcggcaaagcgaacaaacgcaacaggcaaaaagtcttcaggagagcgcgcttacgccgcataaagcgctgcgttttggcgcgttaaccatcgatccccttaaccgggcggtccagctcaatggcgatttcatatcgctctccaccgccgattttgaattgctctgggaactggcgacacacgccggacaaattatggatcgcgacgcgttgctaaaaacgctgcgcggcgtcaattatgatggtctggatcgcagcgtggatgtggcgatttcccgcctgcgtaagaaactgctggatagcgctgctgagccctatcgtataaagaccattcgcaataaaggctatctttttgcccctcatgcctgggacgaaacgacgggataagttagccgacaaattttacctgcctttatcaagtcatagtggcgatgctcatcaccgccactgttcaaaaaacagacattgtatacatgaatgctatttttattagtcgaaacggcccctttattaccgttttctctgcgttgtggttcatgattacgtctttttcgctcaagaaagttaaattaaaaaaactcgaagccagttcacaaaattgataacagaatgtctgcccgccgctatattgccatcttttttcgcaaattgtgaaataaaacaaatcacatacatgaatacataataacaaatatattcaccataaatatatgcgtttccgatagtaacttttgtattaattaataacatataagaaaagttagcatttgctgaaataatattattcagattaggatgcctttgattcaacgaatctgtagaagttcaatcttttgcaaataagttaagtttttaaggataaaaaaatgaaaagaaaagtattggcacttgtcatcccggctctgctggctgctggcgcagcacacgccgctgaaatttataacaaagacggcaacaaactggacctttacgggaaagtagacggcctgcactatttctctgatgactcttctaaagatggcgatcagacctatatgcgtgtcggctttaaaggcgaaacgcagattaacgaccaactgaccggttacggccagtgggaatataacgttcaggctaacactaccgaaggcgaaggcgctaattcctggactcgtctggcattcgccggcctgaaattcggcgactacggctcattcgactatggtcgtaactacggcgtcctgtacgacgtagaaggctggaccgatatgctgcctgagttcggcggcgactcctatacttacgctgacaactacatgaccggtcgtgctaacggcgtggccacctaccgtaacactgatttcttcggtctggtagacggtctgaacttcgcgttgcaatatcagggtaaaaatgaaagccaaagcgctgacgatgtaaatatcggtaccaataaccgtaataatggcgacgatattcgttacgataacggtgatggcttcggtatttctactacctatgatattggcatgggcttcagcgcaggcgctgcgtataccacttccgatcgtactaatgagcaagtcaatgctggcggcacgattgctggcggcgacaaagcggatgcatggacagctggcttgaaatatgatgccaacaacatctatttagcgactatgtattctgaaacccgtaatatgacgccttatggtaaaacggatgcgggttatgctggcggcgtagcaaacaaaacgcaaaacttcgaagttacagcccaatatcaatttgatttcggtctgcgcccggcggtttctttcctgatgtctaaaggtaaagatctgacctataacaacgttaatggcgatgataaagacctggttaaatatgctgatgtaggtgctacctactatttcaacaaaaacttctccacctatgttgattataaaatcaacctgctggatgatgacgaccagttctataaagatgccggtatcagcactgatgatatcgtcgcgctgggtatggtttaccagttctaattattcattaattcttctcaagcccgccgtttcggcgggcttttctttttttatcaccaccgttctaaaaacagaacgcactgttccctgggcacagattgaacaattcttgttcgctctctatggtttgcttatcgcccgacaaaaggaacatgctaatgatcagtctcgtcccgcctctgctttccagaaccgcgcttctctttctgctcacggccacaggcgcagccaccgccgcccgcccggcagcggatattattttgcataacggtaatatcatcactctgaatgatgcccagccgcaggccagcgcgctggtgatttccggctcgcggattgtggcgattggcgatgatacggcgacagatgaatggcgcggcgaccatacccgtaccatcgatttacagggtaaaaccgtgatacccggcctgaccgatacccacatccacgccattcgcggcggacaaacctggacattcgaaacctactggtacgacagcccttcgcttaaagacgcgctggataaattacgcgccgacgctaaccgtcgtccccacgatcaatgggtagccgtagtgggatcgtggataccggcgcaatttgcagaaaaccgggcgccgacggtagccgaattgagccacgcccttcccgatcatccggcttatattcagtatctttacgactatgcgttagtgaatcagcgcggtatagacgtacttggccttaacgacacccctcctcctgatttagcgggaatccgcgtagagcgcgacgcaaaaggtagcgccacggggaaattatttggtgacatcgccgcgtttaaccagctttttgccagcataagtagtaacgccgatcgcgagggcggtctgcgacaatttttcgctgatatgaacgctcgcggcgtgaccggcatcattgacccctctgccgggcctgccgccgcttatgagcctttatttgcaatgcgaaaccagggggatttaccgctgcgcgtggggtatcgcattccggtacagccagaagcgaaaggtcatgaagcgcagtggttcagcaacctgatggcctttcgcccggcgcgtgccgatgacgggcaactggcttttcttggcctgggggaaagcctggtggccggaatgaatgacggcgtgcggatggccccagggttttcttcctcagagcaggacaaaaccgcgcttcgccaggtcgcgacatttgcggcaaaacggggaataccgcttgagatccacgcctataccgatgacagcgccgacgcgatattgacgatttttgagcaggtagcgcagcagtacgatctgcgccctctccgctggtctattgcgcatctgaataccggttcgccacagacgcttgagcgaatgcgtaagctgggtctggcatacactgtgcaaatggggccttactttgaggggcttgccatccgtgacgccaatccacccggcgcgacggacaattcgccgccggttcgactggcgctggataaagggcttgtcgtagctggcggtaccgattcgacgcgtattggcattgccggtgtctggcacgctatcgaatatcatatcaccggtatagcgtcaggcggttccgtgcgtaaacccgccagcgagcggctcacgcgtctggaagcgctagcgttatatacacgtcatgccgcctggctcgcctttgccgaacaacaccggggccagcttcgcgtcggaaaacaggccgatctggcggtactcaatcagccatttatgacgatgccggaagacagaattgataccattcgcgctgttttgacgcttgtcgatggacgcattgttcacgaaagtccggaccttaacgccggacaatgaggttgtcagttgacgcaaagcctgcttttataacccaccagcggcgctgacgggaaatctttttcgtcagcgcgcgatagagctaatgtattgagatccggtgggcgttgatgaaaaagctgtttgtgcagttttaccttttgctgttcgtctgttttctggtcatgaccttattggtcggactggtgtacaaattcaccgccgaacgcgcgggcaggcaatcgctcgacgatctgatgaaaagttcgctctatctgatgcgcagcgaactgcgggaaattccgccgcgtgaatgggggaaaacgttaaaagagatggacctgaacctctctttcgatttacgcgttgaaccgttaaatcactataagcttgatgccgccaccacgcagcgactgcgtgaaggcgatattgtcgcgcttgacgatcaatacacctttattcagcgtatcccgcgcagccattacgtcctggcggttggcccggttccctatctctatttcctgcatcaaatgcgactgctggatatcgccttaatggcgctcattgccttttctctcgcctttcctgtgtttatctggatgcgcccgcactggcaagaaatgctcaggctcgaatccgccgcgcagcgctttggcgagggtcatttgactgaacgcctgcacttcgataatggctccagtttcgaacgtctgggcgtcgcgttcaaccagatggcggataacattaatgccctgatcgccagtaaaaaacagctgattgacggtatcgcccatgagcttcgcacgccgctggtacgtttacgctatcggcttgaaatgagtgaaaatctgacaccgccggaatcacaggcgctcaatcgcgatattggtcaactggaagcgctgattgaagaactgctcacctatgcgcgccttgaccgaccacaaaatgaactgatgttgaccgaacccgacctccccgcatggttgctcgcgcatttgcaggatgtgcagagcgtgaccccggaacgtgccgtaaaccttctcacatgtgtaatcggcgattatggcgcgcttgatatgcggttaatgtcgcgagtgctggataacctgctgaataatgcgttgcgctacagtcgtaccaccgttcaggtcagcctgttactcgacggcagtcaggcaacgttgatagtcgaagatgatggccccggcattgaagcggatgcgcgtgagcgcatatttgaaccttttgtcagactcgaccccagtagagaccgggcgacaggcggctgcgggcttggactcgccatcgtacactctatcgccctggcgatgggcggtagcgtcgtctgtgacgagagcgaactgggcggcgcaaaatttagttttcgctggccggtctggcacgcgatgcccgacatgaccgctgcctgacgcattttgcacgctggttgagcggcgggaactgtgctatatagatagtatgttgtaactaaagtgagtgataccatgtcccgctacgatctcgttgaacgcctgaatggcacttttcgccagatagaacaacacctggcggcgctgacggataatctacagcagcattcgctacttatcgcccgtgtcttttcactgccgcaggtgaccaaagaggcggaacatgcgccgctggatactatcgaggtaacgcaacatctggggaaagaggccgaaacgctggcgctacgtcactatcgccatttgtttattcaacagcagtccgaaaaccgcagcagtaaagccgccgtccgcctgcctggcgttttatgctatcaagtggataatgcgacacagctagatctggaaaatcaggtacagcgcattaaccagttgaaaaccaccttcgagcagatggttacggtagagtccggtcttccctcagcggcacgttttgagtgggtgcatcggcatctacccggcttaattacgctgaacgcttaccgcacgctgacgcttatcaataaccccgccaccatacgtttcggttgggcaaataaacatattattaaaaatttaagccgggatgaggttctgagccagttgaaaaaaagcctcgcgtcgccgcgcagcgtcccgccgtggacgcgcgaacaatggcaattcaagctggaacgggaatatcaggatatcgctgccttaccgcagcaggcccgactcaagattaagcgtccggttaaagtacagccgatcgcccgcatctggtataaaggccagcaaaaacaggtgcaacacgcctgccccacgccgattatcgcattaatcaacacggacaacggcgctggcgtgccggatattggcgggctggaaaactatgacgccgacaatattcagcaccgttttaaaccacaggcgcagccgctgcgactgattattccgcgactgcacctgtatgtggcggattaacgtcccggcgtcatactgccaaccatcaactccggacgtacccaggcgtcgaactcctcgtcgctaaggtatcctaatgccacggctgaggctttgagcgtcagcccttctttatgcgccttcttcgcaatctccgccgctttatcgtaaccgatgtgcgtattgagcgcagtgaccagcatcagcgactcattcagcaactgcgtaatacgctcgcggtttggctcgattcctgacgcacagtgttgattgaaactcgccatgccatcggccagcaggcgcaccgtttgcagaaaattatgaataaccatcggacgatagacgttgagctcaaagttgcccgatgcgccccccatattgatggccacatcgttacccatcacctggcaacatagcatcgttaccgcttcacactgggtcggattcactttaccaggcataatggaactgcctggctcattctccgggatagcaatctcgccaatgccgcagcgcgggccggacgccagccagcgaacatcgttggcgattttcatcagcgaggccgccagtccttttaatgcgccatgcgcctgtaccaacgcgtcacaggtcgccagcgcttcgaatttattcggggcggtaacaaacggcgccgcggtaatcgtcgccagttcctcggccacgcgccgggcatattccgggtgggtattaagccctgtccctactgcggttccgccgagcgccagttccgcgacgtgcggtaaactgtgctcaatatgcctgaggttatgttccagcatggctacccaaccggaaatctcctggcctaaggtgagcggcgtcgcgtcctgcaggtgagtacggccaattttgacaatatcggcgaaagcgtgggatttatcgcgaagcgtatccgttaatgcggataattgcgggataaggtgttcgcgtaacgccagtaacgccgccacgtgcatggcggttgggaacacatcgtttgagctttgactcttattgacgtcatcattgggatgcaccttgcgttccataccgcgaacgccgcccaaaatttcactggcgcggttcgctaacacctcattcatattcatgttgctttgcgtaccggacccggtctgccaaatcgccagcggaaactcatcagcatgttttcccgccagcacttcatcagccgcctggataatcgcgctggctttttccgccgccaacaaccctaagtcctggttgaccttcgcagcggcgcgcttggtcaacgccagagcgtgaatgagcgagacgggcattttctccgtggaaatccgaaaatgctccagcgaacgttgagtctgcgccccccacagtttatctgccgggacttcaatcgcgcccattgaatctttctcgcggcgtaccgttaccattacctgctccttactcaagttgatgagatcatgtgtcgacattgctcacatgtttgcggtcttatgagtattaacgataacaacacaacggtgtagaccggataaggcgcttgcgccgttctccggcaaaatagcgaatcatgttaccgccccgcagggcggcgacattacttaacgcagcgtgcgcactgcgatgactgaatctgctggaagaaatcgttgcctttatcatccaccagaataaaggccggaaaatcctccacttcaattttccagatagcctccatacccagttcaggatattccacgcactccaggcgcttgatactgccctgcgccagaacggctgccgggccgccgatactgcccaggtagaagccgccatgtttcttacaggcatcggtcacctgctggctgcggttgcctttcgccaacatgatcatactgccgccctgcgactggagctgatcaacataagagtccatccgtcctgcggtagtcggcccaagcgacccggaggcgtacccttccggcgtttttgccggccccgcataatagataggatgatctttgatgtactgcggcaaaccttcgccgctgtccatccgttctttcagtttagcgtgcgcgatgtcgcggcccacaataattgtgccgttcagcgacaggcgcgttgataccggatactgcgacaattgttgcagtatctcgctcatgggacggttaagatcaacgcgcaccgcctcgccctctcccgcctggcgcagcgcctcaggaatatatttaccgggattgcgctccagcttctcgatccagatcccttcccggttgatcttcgctttaatgtttcgatccgcggagcaggacacgcccatacctaccggacacgatgccccgtgacgcggcaatcggatgacacgaatatcgtgagcgaaatatttgccgccgaactgcgcgcctaagccaagattttgcgcctcaagcaacaattctttttccagctcaatatcgcggaaggcctgcccgtgttcattgccttcggttggtagcgcatcatagtattttgccgaggccagcttaacggtcttcaggttcgcttccgccgaggtgccgccaatgacaaacgcaatgtgatacggcggacaggcggcggtgcccagcgtacgcatcttatcgacgagataatttttgagcttacccggcgtcagaagcgcttttgtctcctgatagaggtaggttttattcgccgaaccgccgcctttagcaatacaaaggaatttatattcatcgccatcgacgctgtagagatcgatctgcgccggcaggttagtaccggtattgacctctttgtacatatccagcgccgcgttctgcgaatagcgcaggttatcttcgatataggtgttatatacgccgcgagccagcgccgcttcatcacctccaccagtccagacgcgttggccttttttgccgacaataatggccgtaccggtatcctggcaggtgggcaacacgcccttggccgcgatatcggagtttcgcaggaattgcagcgcgacatatttgtcgttttcactggcctgcggatcgcgcagaatatccgccacctgctgctgatgcgcgggacgtagcataaaagacgcatcgtggaaggcctgacgcgccaacagcgttagcgcttccggcgcgactttcaggatctcttgtccttcgaattcggcgacggaaacatgttcgctggtcaacaagtagtactcggtatcgtcctttttgaggggaaaagggtcttgataaaagaagggtttgtttgacattgtgctctcacttaccgctcggtatggttattctctgggcaggtgttccattgcccgactcaaagcgagtaacactatcctacacaattttttaacaaaaactgagacaagtacgactttttacgcccggaggttacttcatgcgggtttcttggtttaatacctcccattgatctccacattgaaacagggcttgataatgcaaaaactcattaactcagtgcaaaactatgcctggggaagtaaaactgcgttaacggaactttatggcatcgccaatccgcagcagcagccaatggctgaactctggatgggcgcgcatcccaaaagcagctcgcgaatcaccaccgccaacggcgaaaccgtctccctgcgtgacgccatcgaaaagaataaaaccgccatgctgggcgaagcggtagccaaccgtttcggcgaactgccgtttctgtttaaagtactgtgcgccgcgcagccgctctctattcaagtgcacccgaataagcgcaattccgaaatcggtttcgcgaaagaaaatgcggcgggtatccccatggatgccgcagagcggaactataaagatcctaaccataaaccagagctggtttttgccctgacgcctttcctggcgatgaacgcgttccgcgaattttctgacattgtctctttactgcaacctgtcgccggcgcgcattccgctatcgcccactttttgcaggcgccgaatgctgaacgtctgagccagcttttcgccagcctgttgaatatgcaaggcgaagaaaaatcccgcgcgttagccgtactcaaagcggcgcttaacagccagcaaggcgaaccgtggcaaacgatccgcgtgatttcagagtattatcctgacgacagcgggcttttctctcctttgttgctgaatgtggtcaaactgaatcccggcgaggcgatgttcctgtttgccgaaacgcctcatgcttatctgcagggcgttgcgctggaagtcatggcgaactccgataacgttctgcgcgctggccttacgccaaaatatatcgacatccctgagctggtcgcgaacgtgaagttcgaacctaaacctgccggcgagttgctgactgccccggtgaaaagcggcgcggagctggacttcccaattccggttgacgattttgctttttcactgcacgacctggcgcttcaggagacgagcatcggccaacacagcgccgcgattctgttctgcgttgagggtgaggcggtgttacgtaaagatgaacagcgtctggtactgaagccgggtgaatcggcctttatcggcgcggatgagtctccggttaacgccagcggcacaggccgtttagcgcgtgtttataacaagctgtagcaacgtactgaattttttaacaactcttgctaagcttataacagacgtaaaactcctccaggcggtttaatccgcctggtttcatttttatggacaattgatatgaaaaaaacactggtagctgcaggtgtagtgattgcacttggcatcgtctggacaggcggcgcctggtatacggggaaaaagctggagaaccatctttcagaaatggtgactcaggccaatgaacagctcaagcgtactgcgccggaggccggtgtcgaattaagttatcaaaactaccagcgtggcgtgttcagtagccatctgcaactggttgtcaaaccggttgccggcgcagacactacctggttgaagcccgggcaaagcattgtgctggacgagtccgtttcacatggccccttcccgctcgcccagctcaaaacgctcaatctgatcccttctatggcgtcggtaaaaaccacgctggtgaataacgatgcggcaaaacccctctttgatatcgcgaaaggcgacacgccctttgttatcaatacccgcattggttatggcggcgatacccgctccgatatctctctcaagccgttaaactacgagaatgccggtgaaaaggtcgcctttagcggcggcgagttccagcttaacgccgataaagacggtaatgtggtttcgctgtcgggcgaagcgcagagcggcctggtcgatgccgttaacgaatataaccagaaggtccaactcacctttaataatttgaaaaccgacggtaccagtaaactggcaagctttggcgaacgtgtgggcgaccaaaagttaacgctggataaactgtccatcgccattgagggtaaagagatggcggtgctggaagggatggaaattgccggcaagtccgatctcgtcaacgacggaaaaaccattaacagccagttggattactcgcttaacagcctgaaagtgcagaatcaggatttgggcagcggtaaattaacgctgaaagtcggtcaaatcgacggcgaagcctggcaccagtttagtcagcaatatcatgcacaaacgcaggcgctgctgaatcagccggacgtggcgcagaatcctgagctttatcagcaaaaagtcactgaagcgttctttagcgctctccccgtgctgttaaaaggcgatccggtactgaccctggcgccgcttagctggaaaaacgccaaaggggaaaccacgctgaatctgtcgctgttcctcaaagatccggcaaccacaacggcacaaccgcaaacgctggcgcaggaagtcgaccgctccgtgaaatcgctggatgcgaaactggcaattccgatggacatggcggtcgagtttatgacgcagatagcaaagctggaaggctatcagcaggatgatgcggaaaaactggcaaaacagcaggtgcaggggctgtccgcaatgggtcagatgttccgactgacaacgctgaaggataatactatcgcctccagtttgcagtacgccaatggccagatcacgctcaacggacaaaaaatgccgttggaagactttgtcggcctgtttgggatgccggcgctttccgtaccggacgttccggcgctgcctcaacaataatcgccttgccgggtgtcgcgacgctgcacccggtctgcgccgaacgacgcgcagcctctacttttgcgttaccaggcgagcggctatcgtttgactccgcacatggtgctcgtcgtgagcattaggcggcacggaaaacatcgtgagtctggacaactgcatccccccctacgcctgtcagtgaaagatatgtcgtttgtcgatgtccaggcattgaaggacaatcacgcgacaggcatcgtacagctcaatcagcataatttgcaggtaattatcggcccgcaggttcagtcggtaaaagatgaaatggttggcctgatgaataccgttcaggcataaagaagggatatgttcgatttttcacaggaagttgaccgacgcgggacatggtgtacgtagtgggattatgtcgccgatcgttttggcgaagccgatctgctcccctttacgatctcggatatggattttgccaccgcaccgttcgctgatactgtctacaagcggggggttgaccctttatcctgagaggcgataacagagacggcccccgtgagctgactgggggcgcgttaaagagaatgatacaaaatttctcccgcgctctcgcgaagttgcaacgtaatgactccgtttttgcaaaatttccagagcattatcaatctgtagtataatggtgcgcacttttattaaaaattgagtgcgcccatgattgatattacgcttcctttgactgacatccaccgccaccttgatggcaacattcgcgcccaaacaattctggatcttggtcggcagttcaacatcgcccttcccgcccaaacgctggaaacgctgattccgcatgtccaggtcacctcaaccgaacccgatttagtgagctttctcacgaagctcgattggggggtaaaagtcctggcatcgcttgacgcctgccgccgtgtggcctttgaaaatattgaagatgccgcacgtaacggcctgcattacgtcgagcttcgcttttcgcccggctatatggcgatggcgcatcagttaccgatagcaggcgtggttgaagccgttatcgacggcgtacgcgacggctgtaacacgtttggcgtcgaggcgcgactcattggcattatgagccgtaccttcggcgaggcggcatgtttacaggagcttgatgcgctgctggcgcacagagagaacatcaccgcgctggatttagccggtgatgagctgggctttcccggcagtctgtttttgtcgcactttaatcgggcgcgcgatgcgggctggcatattaccgttcacgctggcgaagccgcagggccggaaagtatctggcaggcgattcgcgaactgggggccgagcgtatcggacatggcgtaaaagctgtcgaagatcgcgcgttaatggattttcttgtacaacagcgtatcggtattgaatcctgtctgacctcgaatattcagaccagtaccgtcgcatcgctggcagatcatccgctcaaaaccttccttgagcatggcgttctcgccagtcttaatacggacgatccggctgttcagggcgtagatattatccatgaatatcacgttgccgcgccagcggcaggattgagccgcgaacagattcgccaggcgcagattaacggtctggaaatcgcctttttgagcgatggcgaaaaacgtgcgctgcgcgaaaaagtggccgcggcgtaagattgctttattgatgctaacgccctctctccgcctgcgatttaatgctatcccaggcggagaaatgcgacatctcaggcaagacacagcgtcgcgcgatgttttgccgattccatgcccagttcaatcaactccataatttgaatcgcctggcttgccggcacgggattttcaccgttaccgtttaacgcatcgcggatggcggcataatatgccgggtagttacccggcaacgtaagccagttctcttctttgcgcgtctctccctcaaccagggtcaatacgccgtcacgcatgtcgtatccccagtcttcctgcggtaaacgctcgccgttttttaaccgttcttcctggggatcgaggccatatttaacatagctaccgcgcgaaccatgaacgatgtatcgcgcggattccgccgcggccagcatcgtaccgtgcaaaatcacgcggcgctgggggtaggataaaatcgcgtggaaataatctgtagattgcgcgcccggacgcagttgcgctaaatccaccgtcatgctgaccggcaggccaaaaagctgaatggcctgatccaacaagtgcggcgccagatcgtaccagataccacttcccggcccgccttgctcgcgccagcggtcgcgcacctggggacggaagcgatcaaagtgggattcaaacaaggacacctcgccgagcacgccatccgccagcaaggctttcagcgtcaaaaaatcgctgtcccagcgtcggttgtggaagacggaaagtacccggccagtgctccgcgcaagcgcatccaattctcgcgcctgtgacagtgtcacggtaaagggtttatcaaccaccacatgtttaccggcttccagcgcagctttcgccagcgggaaatgggtatcgttgggcgtcgggatcacgataaggtcgatatgcggatcgttaaataaatgtcggggctcagagaccacggaaaccgccggccaatctgctttcacttttgtttcatcgctgctggataccgccgcaagctctagccctggcgttcccataattaagggcgcatgaaaggttttactggcgtagccataaccgattaacccaacgcggattttgtcattcatctcactgcctccggttttagatatcgctattccacaccatcgtgcgattagccgcaatagcgtcctgaccatcaacgtagcatcaaatgattaacttgttacagaacagaggctgaaaacgtttccctccctcttgccgaccgttcgccaggaaagtaacatttaccccctgtgtttatggataaatcaaagcaaatgtcgtcaataatgaatcgtcttattgaattaactgggtggatagttctcgttatctcagtcattcttttaggtattgccaaccatattgacaattaccaaccaccagagcccacggcttccgttcagaagaagtaagcgtcagataatgtaaaggcattttcgcgtggcacggtaagcggcgccccgggggggcaaagaaaagtcaaaaaccggcaaaaaaaacgaaagtatgtcctatctggtctgacgtttattgcctgttgtaggaaagcgcgttaacctttcgccccaggcgccatgtggcgcctgactctttaccggtaagaatattccctttttacctgcacccctgacctctcactggtgcggttttgtttattttttatcagtgactactccgttggcattatatttaatatggatcaactttatatgactgttcaggattatctattaaaattccgcaaaattagttcgctcgaaagtctggaaaaactgttcgaccaccttaactatacccttactgatgacatggacattgttaatatgtatcgcgctgcagatcaccgccgtgccgaactggtttccggaggacgcctgtttgatgtaggtcaggttccgcaatccgtctggcgctatgtgcaataaagaaagtagcgtttaacatcaaaaaccttataatatttgccccaaaatgagcggcatgaccgttaatgcgcgtaaccccggagaagatatgactacaacaccgccacaacgaattggaggctggcttcttggcccgttagcctggctgttagtcgcgttgttgagcgcctcgctggcgttattactctacgttatggcgcttgccacaccgcaaacgttcaagacgcttagcggacaggaaaccggtaatttactgctatggggcatttcatttattaccgctatcgccatgtggtactataccctgtggttgacgatcgcattcttcaagcgcagacgctgcgtgccgaagcattacattatctggctgctggtgtcggtgttactggcggttaaagcatttgccttttcgcccgtctcagatgcctttgccgtgcgtcagttactcttcccactgttggcgacggcgctcattgtgccttatctcaaacgttcagcgcgcgttaaaacaacgtttgttaatccgtaataaccctacagttaacctgttgtcgcctgtggtagtttgacagataataggcggcttttttatttcaggccgaaacatgactgattacctgctgctctttgtcggaactgtactggtcaataactttgtactggtcaaattcctgggcctttgtccctttatgggcgtatccaaaaaactggaaaccgccatggggatgggcctcgcgacgacctttgtcatgacgctggcgtcgatatgcgcctggcttatcgacacctggatacttattccgctggatctgatttatctgcggacgctggcctttatcctcgtcattgctgtggtcgtgcaatttaccgaaatggttgtacggaaaaccagcccggcgttataccgcttgttaggcatcttcttaccactgattaccactaactgtgcggttctgggcgtagcgttactgaatattaatctcggtcatcactttcttcagtcggcgctgtacggattttccgccgccgtcggtttttcattagtgatggttctgtttgccgccatccgcgaacgccttgccgtggcggatgtgcccgccccttttcgtggtaacgcgatagcattgattaccgcaggattaatgtctttggcctttatgggctttagtggtttggtgaagttgtaatgaatactatctggattgccgttggcgccctgacccttctgggcctggtgttcggcgccattctgggttatgcctcccgccgattcgcggttgaagatgatccggttgttgaaaaaatcgatgcgattttgccgcagagccagtgtggtcagtgcggctatcccggctgtcgcccctacgctgaagccgtgggtctccagggcgagaaaatcaatcgttgcgcgcccggcggcgaagccgtcatgctgaaaatggcagagctgctaaacgtagagccgcagccatgcgatggtgaagaacagcaggccgcgccagtacgtatgctggcagttattgatgaaaataactgcattggctgcacaaaatgtattcaggcctgcccggttgacgccattgttggcgcaacgcgcgccatgcacacggtcatgagcgatctctgtactggctgtaatctgtgcgtcgatccgtgtccgacgcactgcatcgaattacgtccggtgaatgagacgcccgacagttggaaatgggatttgaacaccattcccgttcgcatcattcccgtggaacaacatgcttaaactattttccgctttcagaaaagataaaatctgggatttcgacggtggtattcatccgcccgaaatgaagacccagtcaaacggcacgccgctgcgtcaggtgcctttagcgccgcgcttcgttatccccttaaaacagcacattggcgctgagggcgagttgtgcgttagcgtcggcgatcgcgtgctgcgcggccaggcgctgacccgtggacgtgggagaatgctgccggtacacgcgcccacctccgggacggttatcgctattgccccccactcgacggcacatccttcggcgctggcggagttaagcgtcatcattgatgccgacggcgaggaccgctggattgaacgcgagggctggtctgattaccgcgcccacagccgtgaagcgctcattgaacgcattcatcagtatggcgttgccgggcttggcggcgcagggtttcccaccggcgttaaattgcagggcggcggcgataaaatcaccacgcttattatcaatgccgcagagtgcgaaccttacattacggcggacgatcgtctgatgcaggactgcgccgcgcagattgtggaaggtattcgcatcctggcgcatattctgcaaccgcgtgaggtattaatcggcattgaagataacaaaccgcaggctatttccatgctgcgcgccgtactggctgacgctcacgacatttcgttacgtgtgatcccaaccaaatacccttccggcggcgcaaaacaactcacccaaatactgacgggaaaacaggttccccacggcgggcgctcctctgatattggcgtgctgatgcaaaacgtcggtacggcttatgccgttaaacgcgccgtggttgacggcgaaccgatcacagaacgcgtcgtcaccttaacgggtgaagcggtaagccgtccgggtaacgtctgggcgcggctcggcactcccgttcgtcatttgcttaacgatgccggattctgcccttctgctgaccagatggtcatcatgggcggcccgttgatgggattcccccttccctggcttgacgtaccggtcgtaaaaatcaccaactgcctgctggcgccatccgtgactgaaatgggagcgcctcaggaagagaaaagctgtattcgttgcagcgcttgcgctgacgcttgccctgccgaccttttaccgcagcagctttattggttcagcaaagggcagcagcatgacaaggctaccgctcaccatattgctgattgtatagaatgcggcgcctgcgcctgggtctgccccagtaatattccgctcgtccaatatttccgtcaggaaaaagcggagattaatgcgatcaggcttgaagaaaaacgcgccgccgaagccaaagcgcgttttgaggctcgtcaggcaagactggagcgcgaaaaagccgcccgccttgcacgtcataagagcgcagcggtacaaccagcggcaaaagatcaggatgccattgccgctgcgctggcgcgggtaaaagagaaacaggcgcaggccacgcaaccggtggttattcaggcgggtagtctgccagacaatagcgccgtcatcgcggcccgtgaagcgcgtaaagcgcaagcgcgcgctaaacaagccgctcatccggtggctgacagcgcgatatccggcggcgacccgcgtaaagccgcagtggaggcggctatcgctcgcgccaaagcccgcaaacaggagcagcaggccggaagcgaacctgccgaaccggtcgatccgcgcaaagccgcggtggaggcggccatcgcccgcgccaaagcccgcaaacaggagcagcaggccggaagcgaacctgccgaaccggtcgacccgcgcaaagccgcggtggaagcggctatcgcccgcgccaaagcccgcaagcaggagcagcaggccggaggcgaacctgccgaaccggtcgatccgcgtaaagccgcggtggaagcggccatcgcccgcgccaaagcccgtaagcaggagcagcaggccggaagcgaacctgccgaaccggccgacccgcgtaaagccgcggttgctgcggctatcgcccgcgttcaggcaaaaaaagcagcacagcagcaggttgttaacgaggattaaatggtattcagaatcgcaagctcgccttatacccataaccagcgccagacatcgcgaatcatgttgctggtagtaatcgccgctctgccggggattgccgcgcagacgtggttttttggttggggaacgcttttccagatcgttctggctgctatcacggcgctcgtcgcagaagccattgtcctcaggctgcgcaaacaatcggtcgccagtcacctgcaggattattccgcgttattgacggggcttttgctggcggtcagcatccctccgcttgcgccctggtggatggtcgtgctgggaaccggattcgccattattatcgctaaacagttatatggcgggctgggacaaaacccctttaatccggcaatgatcggttacgtggtgctattaatttcctttccggtacaaatgacaagctggttgccgccttatgaaatagccgcaacaacgcccgatatgctggacacgttacggatgatttttagcgggcataccgccagcggcggcgatatgacgctgctacgtatcggtattgacggtatcagccaggcgacgccgctggatacgtttaaaacgtccttgcgcgccggacattccgttgagcaaattatgcagtacccgatatacagcggcgcgctggccggcgtgggctggcagtgggttaacctcgcctggcttgtcggcggcgtattcctgctgtggcaaaaagctatccgctggcatatcccggtcagttttctgctgacgctggcgctatgcgccgcgttaggttggcttttctcgcccgctacgctggcctcgccgcagcttcatctgctgtcaggcgccaccatgctgggtgcattttttatcttaacggatccggttaccgcctccacgaccaaccatggacgtttaattttcggcgcgctggctggggtattagtgtggctgattcgtagcttcggcggctatccggacggcgttgcttttgctgtcctgttggcgaatatcacggttcctctgatcgactactacacgcgcccccgcgtctatggacatcgcaaaggataaaccatgctgaaaacgattcgtaaacacggtattacgctggcgctttttgccgcaggctctacgggattgaccgcggtgattaatcagatgacaaaatcaaccatccacgaacaagcgctgcaacaacaacatgccctgttcgatcaggtattgccgccagatcgttacaataataatctgcaagagagttgttatctggtcgatgcgcccgccctcggcaaaggcacacaccgtgtttttatcgctcgcaaggatgataaacccgtagcggccatcattgaggccaccgcgccagatggctattccggcgctatccagcttattgttggcgcagatttcaacggtaccgtcctggggacgcgtgtgacggaacatcatgagacgccagggttaggtgataaaattgagcgccgtttgtctgactggattacccactttagcggtaaaaccatcagcggtgaaaatgatacgcactgggcggtgaaaaaagatggcggtgattttgatcaatttaccggggcgacaataacgccgcgtgccgtagtgaatgcggttaaacgcgccgggctgtacgccgaatcactgcccgctcagctcccccatttaaccgcctgtggagaatagccatgagcgaaataaaagacattgttgttcaggggttatggaaaaataactctgctctggtgcagctacttggcctgtgccctttactggcagtgacgtctacggcaaccaacgctctggggctgggtctggccacaacgctggtattaacgctgaccaaccttacggtgtccgcactacgtcgctggacgccggcagaaatccgtatcccgatttacgttatgatcattgcctcggtggtaagcgcagtacagatgctgatcaatgcgtatgcgttcggtttgtatcagtctttagggatttttattccgctgattgtaacgaactgcattgttgttggtcgcgccgaagcgtttgccgcgaaaaaaggaccgtggctttccgcgttggacggtttttctatcggcatgggcgcgacaggcgcgatgttcgtgctgggttcgctgcgcgagatcctcgggaatggtacgcttttcgatggcgcggatagcctgctgggaggctgggcaaaagtattacgggtcgagatatttcacaccgactcgcctttcctgctggcgatgctgccgccaggcgcgtttatcggcctggggctcatgctggcggtaaaatatcttattgatgaaaaaatgaagaaacgccgcgccgaaaccgcgccttccgctgttccggcaggtgaaacagggaaagtctgatgaacaaagcaaaaaggctggaaattctgacgcgcctgcgcgacaacaatccgcaccccacaacggaactcaatttcacgtcgccgtttgagttgctgattgccgtgttgctttccgcgcaggcaaccgacgtcagcgtgaacaaggctaccgccaaactttacccggtcgccaatacgccagccgcgatgctggaactgggcgtagaaggcgtgaaatcctatatcaaaaccatcggtttatttaacagtaaagcggaaaacgtgattaagacctgccgtattttactggacaagcataatggcgaagtgccggaggatcgggcggcgctggaagcgcttcccggcgtggggcgaaaaaccgctaacgtagtactaaataccgccttcggctggccgaccatcgccgttgatacgcatatatttcgtgtatgcaaccgaacacagttcgcgccgggtaaaaatgtcgaacaggtagaagagaagttgctgaaagtggtgccgaatgagttcaaagtggactgccatcactggttaattttgcatggccgctatacctgtatcgcccgaaaaccccgctgcggctcctgcctcattgaagacctttgcgaatacaaagaaaaagtcgatatttgatatggtcggagtgcgtccgtcacaccagcgcgctcccaccttcggcctggatctattttagccatcaatcattccagtctctgtcctttttctgatgtaatgtgctttcgttttccctccacgtcaggttaatcattttttaatcgcaaaaatttctatctatccgtgatcaggatcactttgataacttcatgtgaaatttaatgacatctaaggttacatttacaaccggatagactgacgccccattttcactacaaaacattactctgccattttttcagataatggcctatatcactgctttttaccttaaatagcagaagatatcgcctttcacccaaactaatggcctttttgcagtgtaaaaatctgccattcttcaaatgaagaaatttaacgctggataacatttctgacatcggacgattcaaccagaagagttatatgtaacagattattacaaagctcttgtctggagaggaaagatagtgaacattacctgccgtttcccctccaatataacaatcggacggatgagtctgactcatcacgcgccagacaatccctgttaatacggggcgtaaaaaagaggtaaaagtgtctactgcaaacaaaaaaccaactgaaagcgtcagtttgaacgctttcaaacaaccgaaggcgttctatctcatcttctcgatagagttatgggagcgttttggttattacggcctgcaaggcattatggccgtctacctggtaaaacaactgggtatgtcagaagcggattccatcacccttttctcttccttcagtgcgctggtgtacggcctggtcgccattggcggttggttaggtgataaaattctgggcaccaaacgcgttattatgttgggtgccgtggtgctggctatcggttatgcgctggtcgcatggtctggtcatgacgctggcatcgtctatatgggcatggcggctatcgctgtgggtaacggtctgtttaaagctaacccgtcctccctgctgtctacctgctacgcgaaggatgatccgcgtctcgacggcgcatttacgatgtattatatgtccgtcaacatcggctccttcttctctatgctggcgacgccgtggctggcggcgcgttatggctggagcaccgcgtttgcgcttagcgtcgtcggtatgctgataaccgtcgttaactttgctttctgccagcgctgggtgaaaagctacggttccaaacccgactttgaaccgatcaacttccgtaatctgctgctgacaatcgtgggtattgtcgttctgattgcggtcgccacctggctgctgcacaaccaggatatcgcgcgtatggtgctgggcgtaatcgctcttggcatcgtcattatcttcggtaaagaagcgttttccatgcacggcgcggctcgccgtaaaatgatcgtcgcctttattttgatgctgcaggcgattatcttcttcgtactgtacagccagatgccgacgtcgctgaacttctttgccattcgtaacgtcgagcactctattctcggtatcgcgttcgaaccggaacagtatcaggcgctgaacccattctggatcattatcggcagcccgattctggccgctatctataacaggatgggcgatacgctgccgatgccgatgaaattcgccattggtatggtgctgtgttccggcgcgttcctgattctgccgctgggcgccaaatttgcgaacgatgccggcatcgtatccgtaaactggctgatcgcaagctacggcctgcaaagtatcggtgagctgatgatctccggtctgggactggcaatggtcgcacagttggttccgcagcgtctgatgggtttcatcatgggtagctggttcctgacaacggcaggcgctaacatcatcggcggttatgtcgccaacctgatggctgtgccgagcgacgtgactgacccactgatgtccctggaagtctatggtcgcgtatttatgcagattggcatagcaaccgccgttatcgccgtcctgatgctgctgacagcgcctaagctgaaccgtatgacccaggacgatgataccgctgaaaaaggctctaaagccgctacagtttaattttccaggaaacaacattcaggccgctaactgtgcgttagcggctttttttttgctcgtccccgcactaccatactttaaacctcagcaaaaaggagttaccgatgaaactgttctacaaaccgggtgcctgctctcttgcttcccacattaccctgcgcgaaattggcaaagactttacgcttgatggcgtcgatctcgcaaaaaaacgcctggaaaacggtgatgattacctggcagtcaaccctaaaggacaggttccggctctgctgctggatgacggcacactgttgactgaaggcgtcgccattatgcagtacctcgccgacagcgttcccgaccgccagcttctggcgccggtaagtagtcttgctcgctatcatacgctggaatggctcaactatattgcaacggaactgcataaaggctttaccccgctgttccgccctgacacgccggaaactcttaaacccgccgttcgcgccgctctggaaaagaaatttcagtatgtggatgaatcgctttcagacgaccagtggatttgcggccagcgttttaccatcgcagacgcttatctgtttaccgtattgcgttgggcctatggcgtaaaactgaatatggacgggttaacgcatattgaaagttatatgcagcgtgtcgcaaaaagaccgaccgttgcggcagcgcttaaagcggaaggactgaattaatgtcatgttgccggatagctcgctgtaccgccatccggcctctttttagcagcaataattacagccgcgttgcgctgaagtaatgttcagggttagcgatcctgtcctgggccgccacgacctgcagttcgtactcctgcatcgttttggtggcgatcataatctcatagactgccgccgtaacgtgctccagcgcctgctgcaacgtcgcgccctgcaaaagtttgaccagcaataaaccactggtgacatcgccaacgccaaccggctgacgtgaaccgaaatccaccagcggacggctaatatgccaggcttcctgcgctgtcaccagcagcatttcaaagcgttctgaactgtaaccggcgcgggcgagatgttttaccagtacaatttctggcccctgagcaatcagttctcgcgccgcctgcacggcgtcattcacattattcacgctatgtttgctgagaatttccagttcaatcaggttaggcgcgataatatcgctggcgggtagcgcataacgcacatggaactctgcgacgccaggcgccacgatacaacccttttccggatgccccatcacgggatcgcagaaatattttgcctgcggatttgctgctttaacctggcgcacaataccgagaatgtgttctccctgctcggcagatcccaggtaaccgctaagtacggcgtcgcagtgcgctaactggccaatgtccgcaatcccctggacaatctcagtcagatggctgggcggcatgacacagccggtccatttaccatattgcgtgtggttagaaaactgaacggtattcagcggccaaacattcgcgccaagacggcgcatgggaaattcggcggcgctgttgcccgcatgtccgaaaacaacatgggactggatagcgaggatattcttcatttttttacctgaacatcaaaaataagggagtgatttctcactccctgttacttaatgccttatttccagcaaatcagacaatagttctttttgccgcgacgtaataaggtatagcggccaaacagacggtcctcatcgttaaagatgtattcaggatcggattgtttttcaccattgatagtgacagcgttggaggcgatagtcttacgcgcctgaccacgcgacggctggagttcggcgtctaccagcgcctgcatcaggtcggcgcctttttccatttcaaccatcggtacgccgtcctgcgccaactgctcaaagtcagcttcgctcagcgcgctcagtgaaccgctgaacaggcattcagtgatccgtttcgccgcgaccagcccctcttcaccatgaaccaggcgcgtcacctgctcggccagtacatactgcgcgcgcggcgctttaccgctgtttttatcttcttcttccagggcattgatctcctcaatgtccataaaagtgaagaatttcaggaagcgataaacatcggcatctgcggtgttaatccagaactggtagaatttgtacggactggttttcttcggatccagccagacagcgccgccttcggttttaccgaatttcgtgccgtcagctttggtgatcagcggaacggtcaaaccaaatacctgattctggtgcaggcgacgggtcaggtcgataccggaagtgatgttcccccactggtcagaaccgccaatctgtaaggcaacgccgtgcagtttattcagacaagcgaagtcgtacccctgtagcaggttataagagaactccgtgaaagagataccctgatcgtcacggttcagacgctgcttcaccgcttctttgttgatcatctgattaacggaaaaatgtttaccgatatcgcgcaggaaagtcagcacattcatgctgccgaaccagtcatagttattggccgcgatggcggagttttcgccgcaatcaaagtccaggaatggggcaacctgtttacgaattttcgccacccactcctgaacggtctcttcagtgttcagtttacgctcggcggctttaaagctcgggtcgccaatcagaccggtcgcgccgcctaccagcgcaacaggtttgtgccctgcctgctggaagcgtttcaggcataacaatggaaccagatgccccaaatgcaagctgtcagcggtaggatcgaagccgcaatagagcgcgaccgggccttgcgccagtcgctctgccaacgcgtcttcgtccgtcacctgggctaccagtccccgctcttgcaattgtttaatcaagttactgcttgccatcaaaatctccatgtataaaacgactgcacctttgccggtacacgacttttcgccagacgcgaaagagacatagcataaaacggcggattcatccgcaccagtgcttaaaacaagatttttgcatctttagggcgcaagacggtcgattttccatgcgccgtcgtcgcgttggtataaaaagcgatcgtgcagacgatgttcgccgccctgccagaactccatctgttcgatactcacgcgaaaaccaccccaaaagctgggtaacggcacttcgccctgttgaaacttctgcttgagctccaggaatttgctttcgaggataccgcgcgcggaaatgcggctggattgtttagaaacccatgcgccgatctggctgtcgcgcggacggctgtggaaatacctcaccacctcaagtgtggagagacgctcggctttgcctgtcaccatcacctggcgttcaagcatatgccagggaaataacaggctgatacgcggattgtgctcaatttgatgcgccttgcggcttcccaggttggtataaaagaccaggcctttttcatcataatgcttgagcaatacaatacgctggtacggttgccccttgtcatctacggtcgccacgaccattgccgtcggatcggccagtctggcgtcgcacgcttgcccaagccagcgctcaaataaggttaacggttcagcgggtaaatcgcggcgacgcaagccgcctttcgtgtattcacggcgcagatgcgcgatctgctgcaattggtcgttatcagacatggagttgatcagaaataatcagtgggtggcgctattgtgcgcccccatactgaaaatctcaacgcttcggattttgtaactgacagttattaagcacaattctgtctcgtttatagaccgtggcgctctcgccttgcgaccagaaaacataaatcccgtcggtataacgcgcgcccgaggccgagattccttgcttcagggtcagcagcttattgtcataaacaaaactgacctcttcacgcgggttattgactttaacggtaagcggcttctcatcacactggtattccagcgtatccgtttgcatacgttcaacaaattgttgataaacgctacagccggtcagcagcacaggtaaacacattattgcgatctttttcataggcatatcccgaaagctctcctgcttctggaagggcaaacgccccttcctgaccttgctagtttaccgatatagggtccgggaaaaattcagttaactctgagttattgggttagccgggtaaatagcgcctaaaacactggcttctgtagcccccgtcacggaaggtaaatttcccggcaggcccgcgagcgttcgccaggcaagccatgcaaaggccagcgcttccatatcatcgccgctgatccccgccttatcggtggtcgaaacctcgataccgggcaacagcgccgccagacgggccatcactaacggattccggcttccgccgccacagaccatcagccgctcgcagccgccattgagcagcacctgttgggcgatggagaccgccgtcagctccgccagcgtggcctgtacatcgcgcgcgtctgcgccagggaaagccgtaagatgacgctctaaccagccatagttgaaatattcgcgtcctgtacttttgggcgccgacgcagcaaagtacggatcgcgcaacatcttttgcagcaatggaagaataacctgaccttctttcgcccatgccgcgtctttgtcgtagggctgcgcgcattgtcgccaaatccacgcatccatcaacatattacccggccccgtgtcgtacccgcgcaccgcctgtccggggaaaagcagagataaattggcaatgccgccgatattcaggaccatacgtttttccgtcggatgtcccaacagcgcgtgatggaaagcaggcaccaacggcgcgccttgtccgcccagcgcaatatcccgccgccgaaaatcgccgaccactgtaatccccgtatgggcgacgatgtgattattatcgccaatttgcagcgtatgcggggcctcgccggtcggttcatgccagaccgtttgcccatgacaaccaatggcgacgatatcccgcggctgcaaacgttgtcgcgctaacagcgcattaaccgcctgtgcaaaaagccggcctaactgggtatccagctggccgagttgcgagagcgtaagcggctgtccctggcaaatatcgagaatgccttttttcagatgaacgggaataggccaggtgagacttgcctgttgcgcaaccatagtttcatcaattgccgccagtacaacatccacgccatcaaggctggttccggacataacgccaataaaacggcccgatttcatacctcttccttttaagctgggttaagccttaacactcggcataacgtattttgtaatgctatgcccacgtcacgttttttgccgtgtcgtccacggatatcaatgacctatcttttcttgcttccgacttcgtttaagattggttaattaacttctgattatgatttttacattctttcagcagaagatatgaccttaactgcataaatgccatataatttagctatagggatgctgacatagcgtttcgtgaagaacaggagatgggtaaatgattaaacgtgtactggccgtttcactgatggggttatccttagctgggtgtgttaacaatgatagcctttcgggtgatgtttataccgcatccgaggctaaacaagttcagaatgtaacgtacggtactatcgttaacgttcgtccggttcaaattcagggcggtgatgattctaacgtgattggcgctatcggcggcgcggtgttgggcggattcctcggcaacactatcggcggcggtacgggtcgttcactggcgaccgcggcaggcgcggtggctggcggcgtagcgggccagggcgtccagagcgcaatgaataaaacccagggtgtggaactggaaattcgtaaagacgatggcaacaccattatggttgtgcagaaacaaggaaatacgcgtttctcggcaggtcagcgtgtcgtgctggccagcaacggcagccaggttaccgtctctccacgctaaaccaggctttacgtgtggtcacatggccacacgtatgcccctgcacctcaatcgtgagagtgcaattccataatattgtgttcaagtttggcgataagtttaatcagaagctcaatctcctctgaagaaatcccagccaaaatttcaccgcgcgttttatgaatgaccgcttccatctcagcgatcagcggctccgctttctcggtcagtttaatgcgcttagcgcgacgatcgctggcgcaggtttgccgcgaaattagccccttatcttcaagttgatccaacgtgcgtaccagcgatggctgctcaatgcctatcgctttagccaattgaatctgcgactggtcaggcggcaattgatgaatattgtgcaacgtgacccaatgtgtctgcgtcaattccagaggcttgaggcgatggtcaatcagagcacgccaaatgcgcaccaaccgtgccagatcagaacctagtggcgattccaatttcatctccttataattagcttgctaagttattatgctgattttagaatagtgtgcagtatttgtattctcaaaacaaatgtattgctaaatttgcttaccaatagacattttttcagacatagtgcgcacctggcacctgtagcttcagttttggctaaaactaaagcatcgatgtctgacgcaaaggaacattgcttgtgaagtgtatactcaacgccacaggattgcccttacaagatctcatgttgggagcatctgtttactttccgccattctttaaagcctttgcgcttgggttcgttatctggttgtttattcaccgactcctgcgtgaccggatatactctgatgaaatctggcatcccctgttaatggatctctccctctttacgctttgcgtatgtctgggcctcgttttactgatcgcgtggtaaatatgtcgttaaaaacaataaaatatttttctactctcattgtcgccgtcgtcgccgttctggccgcatggtggttatggaattactatatgcagtcaccgtggacgcgcgatggtaaaatccgcgcggaacaggtcagcgtaacgccgcaggtttctggcagcattacccaactcaatatcaaagataatcagttcgtcaacgccggggacgttctttttgtcattgataaaacgcccttccatattgcagaacttaacgcgcaggcgcagttggccaaagcgcagtccgatctggcaaaagcgaataatgaagccgatcgacgtcgacatttatcgcgtaactacatctctgctgaagatctggatagcgccaatctgaatgttaaagcgatgcaggccagcgtagatgtcgcactggcgacgttaaaacaggcgcagtggcagcttagccagacggaagtaaaagcgccggtatccggctgggtgaccaacctttccacgcgtaccggtgattatgccagtaccggtaagccacttttcgccctggtagatagccattcattttatgtaatgggatatttcgaagaaaccaaactacgccatatccgcgaaggtgagcctgcattaataacactgtatagtggcaatgttaagttacagggtcacgttggcagtatcgggcgcgctatttacgaccaaagcgtggaaagtgactccggtttagtgcccgatattaaacccaacgtaccgtgggtacgtctggcgcaacgcgtaccggtacgtatcgaatttgacgctttgccgcaggatatcacgctcgtctccggcactacctgcagcgtagccattgggcagcggtaatgaaactctccctgccagccctgcgaaatacgccctggtttaaagcgacctccggccagtggcgttacgcgttgcgcaataccattgccatgtgtctcgcgctgacattcgcttattatctcaatctggatgagccctactgggcgatgacttcggccgcagtggtgagctttccgaccgtaggcggcgtaatcagtaaaagtctggggcgtattgccgggagtttactcggcgcgaccgccgcgttgattattgccggccatacgctgaatgaaccctggttgttcttatttagcatggccgcctggatcggtttttgtacctgggcctgcgcgcattttaccaataatgccgcttatgctttccagttgtccggctacacggcggcgatcatcgcgttcccgatggttaatattgtagaaatcacgcagttgtgggatatcgcccaggcacgtgtatgtgaagttatcgtcggcatcctctgtggcggcatgatgatgatgatcctacccagcacatcggatggtaccgccctgctcaccgcgttgaaaaacatgcatgcgcgcttgctggaacatgccagtctactgtggcagccggagactaccgacgctatccgctccgcgcatgagggggtcattgggcaaatcctgaccatgaacctgctgcgtattcaggccttctggagtcactaccgttttcgccgccagaatgcattgctaaatgcattgttacaccagcaattacggctaaccagcgtgatctccagtctgcgtagaatgcttttaaattggccgacgccgccggaaaacagccgcgaagtcattgaacaactcttagctgagttggcaaaaccgcgcgcggacagctacaccgtggcgcggattattgcgccgctacgcccgcaggatgaacaggattatcgtcacctcgcgttctggcagcgattacgctatttttgccagctatatctgcgcagcagccgtcagttatatctgatcgaaagcggcgcgccggtagatcaaatccatatccgccgcactcccggccttgcgcggcatacggataacgcagaggccatctggagcggcgtgcgtaccttttgcacgctcacggtaattggcgcctggagtattggcgcgcaatgggaatccgggcccggcgcattaaccctggcggcgatcagttgcgtcctctactccatcgtcgccacgccgtttaagtcgctttccttattgatgcgtactttagtgctgctgtccttattcagcttcgtggtgaaatttggcctgatggtgcaaatcaccgatctgtggcaattcttgcttttcctttttccgctgttcgtcacgatgcaactgcttaaactgcagatgcctaagctggcgggactgtgggggcagcttatcgtttttatgggctcattcatcgccgtgaccaatccaccggtgtacgacttcgccgacttccttaacgataataccgccaagatcgtcggcgtcgcgatttcctggctggcgtttgcgattttgcgccccggttccgatgccgtaaaaagccgccgccatatccgcgcgctacgccgcgatttcgtcgatcagcttagccgtcacccttcccataacgaaagcgagtttgaatcgctgacctatcatcacgtcagtcagctcagcaatagccaggatgcgctggcgcgccggtggttattacgttggggagtggtactgctgaactgctcgcatgtggtgtggcagctgcgcgcctgggagtcgcgttccgatccgctttcccgggtgcgggatatttgtatatccctgctgcgcgatgtgatgagcgagcgcggcgtacagcaacgcccgcttgccgttacgctacaggaactacagcgtatctgcgacacgctcgcacatcatcatcaacccgccgcgcatgaactggcggcgattatctggcgtttacactgttcgctgtcgcagctggaacaggctccagcgcagggaacactgtctccgggttatttaatgacgccgcaggcgtaacgcgttccgccgccgccgagcggtttcggctgatcggacatgttatcgccgcccacatggatcatgagcgctttatctttcacttcatcaagagacttcagacgcggcgcagtaaccggttcggtggcgataccatcattattaacgactaacaccgggaggtcgcccagatgcccctggccttccggtccttcatgcttgccggtattttgtgggtccagatgaccaccagcggcttctgcggcaaccgcttggccgtctttaatcgctggctggcagctaccgttggcatgaatgtgaaaaccatgctcgcccggcggcaacgctttaaggtgtggggtaaattttaagccgccttcggtttcatcgatgacgacggtgccgatagactgtcctacgccttgcgccgtcaccagattcatctctactttctcgctggcagcctgcgcacccgcacaggccagcagcgtcaccatcgctaaacttaatcgcttcataaaacctccgttacatgtggtcgcctgttaagtgtaaaccactggcgaaaacatgtacggaaagtcaacgagttggcgattacggcacgtcataacccagtgccgccttgcggattcggaaccactgttgacgcgacaatgacagcgtttccgcttctagtgcggcacgtacgcgttcgattttacccgagccaataatcggcagcggctgcgacggcaaacgtaaaatccaggcatagaccacctgttcaatagaactggcgttgagttcttgcgcgataacggaaagttcctggcgcaacggctgataagcctcatcattaaacagccgaccgccgccaagacatgaccaggccatcggacgaatacgcagttgctgtaattgatctaatgtgccgtccagcaacaaaggctggtgaaccggcgagatctccacctggttggtcgccagggtgaaaggcaggcgcgattgcagcaacgtaaattgcgctggcgtaaaattagaaacgccaaaatggcgcactttgccgctttggtgcagatgttgaaacgcctcggcgacgtcatccgcatccattaacggatcgggacggtgaattaacaacatatccagataatctgtcgccagattttttaatgactgttcggcgctcagaataatatggcggcgatcggtaatataatgaccgagcttattttccgctctggcagtggtggcaataccgcatttggtgacgatttgcagtctttcccgcaaatgcggcgccagcgttagcgcctcgccaaatgccgcttcgcactgataaccgccataaatgtccgcatggtcaacggtagtgacgcccaaatccagatgttcttcgataaaactcactaactgacgcgcggacatattccagtccatcaaacgccagtaacccatgacaaaacgcgaaaactccgggccttgtggagcgatggtgacacgctgaaccataacagattcctcatagagaataatgaggttgagtatacgcaattccgcgtttaaaagagtgaaggttgttgaggatcttccgatgggagaggcttgtttgcgcgtattttacgcaagaaacgctggcgacaaagccgcagtacattttgtttctcggcatcgctcattttttgccagttaaaccgttcgtcgcggctgcgcatacagccccgacaaaagccacgctcatcagactggcagataccgcgacatgggcttgctacaggaaaaaactccaactgctcggccacatcccctcctcaacgtttggcgcttatgactattgaagacgctaactgacattatggcaactctgcttgcagtagaccgactggtctactatactgcctgctatgaataagcaaaccgaacatgatacccgcgaacatctgctggccaccggcgagcagctttgtatgcaacggggttttaccggcatggggcttagcgaattgctcaaaaccgcccaggtgcctaaagggtcgttttatcactactttcgctcgaaagaagccttcggcgtcgccatgcttgagcgacattacgcctgctatcatcagcgtcttacggcgcacttcacctccggtcccggtaatcatcgcgatcgccttctcgcctggtatcaggaaacgttaaagcagttttgccagcaaggcgccatcagcggttgcctgacggtgaaactgtcagcggaggtctgcgatctgtcggaggatatgcgctctacgatggataaaggggcgcaggagatcatggcactgcttgcacgcgcgctggaagatggccgtaatagccactgtttacatttcaccggccagccgttgccacaggcgcaggtactttatgccctgtggctgggcgccaatttgcaggccaaaatatcccgtagcgccgcgccgctggaaaatgcgttggcgcatgttaagaccatcattgcaacgcctgagcagtaacaggcgtttttatttcctttattacaagacgaccggtctacttatatcaggagccactatgtcatcagcaaaactgtttacccccctcaaggtgggtgccatcacggcgacaaatcgcgtatttatggcgcctttgacgcgtttgcggagtattgaaccgggcgacattcctacgccgttaatggcggaatattaccgtcaacgcgccagcgccggattgatcatcagcgaagccacacaaatctccgcacaggcgaaaggctatgccggcgcaccgggattacacagcgatgagcagatcgccgcctggaaaaaaatcactcagggagttcatgctcagggcggccatatggcggtgcaactgtggcatacgggccgtatttcacacgccagcctgcaaccaggcggacaagcgcccgttgcgccatccgctatcaatgcgggaactcgcacttctttgcgtgacgaaaacggccaggccatccgcgtagaaacttccacgccgcgcgcgctggatactcacgagatccccgggatcgtcaacgatttccgccaggctatcgccaatgcccgagaggcaggcttcgacctggtggagctgcactccgcgcacggttatctgctgcaccagttcctctctccgtcttctaatcaccgtaccgatcggtacggcggcagcgtagagaatcgcgcccgtctggtgctggaggtggttgatgccggcattaaggaatggggcgccgaccgtatcggcatccgcctttctcctgtcggcactttccagaatgtcgataacggcccgaatgaagaagctgacgccctttatctgattgaagcgttaggcaaacgcggcattgcttatctgcatatgtctgaaccagactgggcgggcggagaaccgtacagcgacgcattccgtgaaaaagtgcgcgcgtgtttccacggccccatcatcggcgctggcgcctatacgccagaaaaagcggaagatctgatcgaaaaagggctgattgacgccgtggcgtttggtcgcgattacatcgctaacccggatctggtggcgcgtctgcaacgtaaagcggaacttaatccacagcgtcccgaaagtttttatggcggcggcgcggaaggctacactgactaccctactctgtaatttcattgatagcggccgcacatcgccgctatactttgaatatcttgactattttaaggacaacgaaaatgcgtttattgcatactatgctgcgcgtcggcgatttgcagcgttccatcgctttttacaccaacgttctgggcatgaaattgctgcgtaccagtgagaatccggaatacaaatactcgctggcctttgtgggatatggtccggaaacggaagaagcggtcatcgaactaacctataactggggcgttgagagctatgacatgggcaatgcgtacgggcatatcgcgctgagcgttgacaatgccgctgaagcctgtgaacgcattcgtcagaacggcggcaacgtgacccgtgaagcggggccggtaaaaggcggttcgactatcatcgccttcgttgaagatccggatggctataaaatcgaattgattgaagctaaagacgcaggccgcggtctgggtaactgatcccccgccgggcgcaggtcactgcgcccgttgttttactgcatcccggcgtaaaatttgccataatacgcgctgcattttttcgtattaagagactcagatgtccgataacgctcaactttccggtctgtgcgaccgttttcgtggtttttatcctgtcgtcatcgacgttgaaactgcaggatttaacgctaaaaccgatgcgctgctcgaaatcgccgccatcacgctgaaaatggatgaacaaggctggctgatgccggacatgacgctgcatttccatgtggagccgttcgctggagccaacttacagccggaagcgcttgcgtttaacggtatcgatccctctaacccgctacgcggcgcggtgagtgaatatgaggcgctacacgctattttcaaaatggtgcgtaaaggtatcaaagaaagcggttgtagccgcgccattatggtcgcgcataacgccacttttgatcacagttttatgatggccgccgcagagcgcgcctcgctgaaacgtaacccgtttcatccgttcgtcacctttgataccgcggcattgagcggactggcgctggggcaaacggtgttatcaaaagcgtgcctggcggcaggtatggagtttgacggcgaaaaggcccattccgctttgtatgataccgagcggacagcggtgctgttttgtgaaatcgtcaatcgctggaagcgcctgggcggctggccgttacctttgccgacggataaataacgtggctaacgacgccgcttttgctcacgatggcggtaaaaaagcgacctttacaggtcgctttcccctttcacagattactctgcgtccggctcctgagttttatattttgccgcagtttctttaataagctgctgcaactcaccacgctgatacatctcaatcacaatatcacacccgccgaccagctcgccgtccacccacagttgtgggaatgtcggccagttggcgtatttcggtaattcagcgcgaatatccgggttttgcaggatatcaacataggcaaaacgttccccgcaggctgaaagcgcctgaacggcctgcgcagaaaaaccacagcttggcagtttcggtgaacctttcatatacaggagaatcgggttttcagcgatctggcgctgaattttttcgatagtggtgctcattgtctcgcttccttaaactacttttacgactgaagcctgtcattgtaacgggtcaggctggcaacggaaaataacattttcatcatgccttattattttaccgtctgcgggaataagttgtatacaaaatatcttttaagcgggttgccacgcagtgattcgtcgataacgcgttcgtgtttagcattaattgctattttttttacatctgttaacgaaacacagcttcagaaaccaaaagcaattaccaatctgtgcttttgtagattagaattatcaggttttgtaaatcatacgcaggcatgaatcgcctgcctttaacagaggattgctcagtggcgcggataaacaaaatctcgatcacgctctgtgctttactttttactactctcccttttacgccaatggcccatgcttccaggcaagccaaagcgacgcctgctgtttctcatgtcacgaaaacggcagataaaaagaaaagcacaacgaaaaagatcagtaagaccagcaaaaaaaacgtaaaaaaaacctcaaaaaccagccgttcttcttccgcttctacgccaaaacgtaccaccgccgccacgaaatctcgtcatacgacgcatcgtcgtaacagaaccgcgcccgcgtcaatcgccgccctcgacgtaacggaaaaatgcacgacgcgtaaaggccgtaagccgcactgcgtgaaggggaaaggaacattgccggtctctattgccgatgcgcatcgtgcaaaagtacaaaaagcgacgaaaaccgcgatgtccaaactcatgaaccagattggtaaaccgtatcattggggaggcgcgtcgccgcgtaccggttttgattgcagcggtctggtttattatgcctataaagatttagtgaagatccgtatcccccgaacggcgaatgagatgtatcacctgcgtgacgcggcgcccattgagcgtagcgagttgaaaaacggcgatctggtgttcttccgtacgcaggggcgcggcaccgccgatcacgttggcgtctatgtcggcaacggtaagtttatccagtctccgcgcagcggtcaggaaattaagatcacctcactgaacgaagaatactggcaacgtcattatgtcggcgcccgccgggtgatgacgcctaaaacaattcgctaatattttatcctgtcgtttaacgacaggataacttcttcttttgcgccaccgctcaatttgctaccctatccttacgcgcaccaggggtattgtgcgtgcgcaatattaataataaggagagaagcaatgtcgttcgaattacctgcattaccgtatgccaaagatgctctggcgccgcatatttctgctgagacgctggaatatcactatggcaaacatcatcagacttacgtgaccaatcttaacaatttgatcaaaggcacggcgtttgaaggcaaatcgctggaagagatcgtgcgcacttccgaaggcggcatctttaataacgccgctcaggtgtggaaccacaccttctactggaactgcctggcgccaaacgctggcggcgaaccgaccgggaaactggctgatgctatcgcggcatcttttggcagcttcgcggaatttaaagcgcagttcaccgatgccgctatcaaaaactttggttccggatggacatggctggtaaaaagcgctgatggcaaactggctatcgtttctacctcaaatgccggtacgccgctgactacggatgcaacgccgttgctgacggttgatgtgtgggaacacgcgtattacatcgactaccgcaacgcccgtccaaactatctggagcatttctgggcgctggttaactgggaatttgttgcgaaaaatctcgccgcataagtctgagtacgcagaaggtacgccttctgcgttttagagagggatagaatagaggagacgcccaccctcagaagagaggaaatcagtgcagagcggccgttaatccacctgcgacaatcacgcccagaacaatcagcgtagtaatcaacgaaaatttcaggtcggtactcatcaagttttctcctttttattcccacacaaaaagtgatatagcgcatttttgcacattcccgcacaaaaatctctcatgttttatattgataactgtttttaacgcttccccttttcctcaagatcagacaaaattccaggcttactgaattagcgtaacggccattgaccccttcctgacgttccgtgtcgtttttccggcgtgccgcaaccctgatgttgcgattagggtgtgtgtaggcaaacgtttacctggcgtttctcaggagcttagcgagggtctggagtgaaatgtaatggcaacaattaaagatgtagcgaaacgagcaaacgtttccactacaactgtatcacacgtaatcaacaaaacgcgttttgtcgctgaagaaacgcgtaacgcggtctgggcggcaattaaagagctgcactactctcccagcgccgtcgcgcgtagcctgaaggttaaccataccaagtcgataggcttactggcgaccagcagcgaagcggcctattttgccgaaattatcgaggcggttgaaaaaaactgtttccagaaaggctatacgctgattttaggcaacgcctggaataacctggaaaaacagcgcgcctacctgtccatgatggcgcaaaagcgcgtggatggcctgctggtgatgtgttctgagtatccagaacctctgctttccatgctggaagagtatcgccatattccgatggtggtgatggactggggtgaagcgaaggccgattttaccgacacggtgattgataacgcctttgcaggcggctatatggcgggtcgttatctggttgagcgcggccaccgggatatcggcgttattcccggcccgctggagcgcaacaccggcgcgggccggctggcaggctttatgaaagccatggaggaggcgctgatcaacgtgccggacaactggattgttcagggcgacttcgagccggaatccggttaccacgcgatgcagcaaattttatcgcagtcacatcgccctaccgccgttttctgcggcggcgatattatggcgatgggcgcgctttgcgcggctgacgaaatggggcttcgcgtaccgcaggacgtttcggtgatcggttatgacaatgtgcgtaacgcccgttactttaccccggcgctgacgacgattcaccagcccaaagactctttaggcgaaaccgcatttaatatgctattggatcgcatcgtcaataagcgcgaagagtcacagtctattgaagttcatccacgcctggttgagcgtcgctcggtcgctgacggcccgttccgcgactatcggcgttaatccccgctgtcgggagcctcttctggctcccgcagccactcccgattcaacgtttcgctatcgcccaaatagtccagcagccatgccagcgcgggcgaggcttcgttttgctgccacgtcacgcaacaggccgcatcgggaaacggattctctaacgtcagcgccacccattttccgctgtctatccactgtcgggcaaaatgcgtcggcaccattcccacgcatagtcctgccgacaggcaggttgccgatgactcccagtccggtacgacgacccttttttggttatccagcagccaggtaatccgtttcggtaaggttcgcgaagtgtcttccctgaccagcgacggccagttgcgcagggtatcatcgcttaacggcccaggcatcgacgccagcgggtgatcgcttgccactacgcagctccagctcagggtccccatatcccgaaaagcgtaacgcccccctaccggaatcgcctgcgtcgccccaatcgccagttcgacacgcccgtcggagagcgcgtcccagacgccgttaaacacctcctgaaaaaccagcagttccacatcgtcaaaatggcgatagaaatcgacgatcatctgccgggtacgttctggtctgacgatattgtccaccgcaatagctaactgcccacgccaaccattagcaatttgctgacactgttggcgagtgatctgcatttttttgataacagaacgcccttcttttaaaaaccagacgccagcaggcgtcagttcaacatcacggtgacgtcgtacaaaaagcggtacggccagccactcctctaactgacgaacggtgtaactgactgctgaaggcacacggtgcagttcctgcgccgccgcgctaaaactgccattgcgcgctacggcgtcaaccacttcaagcgagtattccgaccacataatttgcctacaaaaattttgaattcactggacaaatattaacgtttcacaaccgtaatttcactccctacactctgcgacaatgtctgtctgataagaaagagaaacaaatatgcaacctggaaaaggttttttagtctggttagccggtcttagcgtgctgggatttctggctacggacatgtacctgcccgcgtttgccgccatacaggcggatttacaaacgcctgccgccgcggtcagcgccagcctaagcctgtttttagctggctttgccgtcgcgcaactcctctggggaccgctatcggatcgttatggccgtaaaccgattttactgctagggttatctatctttgcactcggaagtctggggatgctgtgggtagaaagcgcggcagcactgctgacgctgcgcttcgtgcaggccgtcggcgtttgcgcggcaacggtaatctggcaagcgctggtgaccgattattacccttcgcaaaaaattaaccgtatcttcgccacgatcatgccactggtgggattatccccggcgcttgcgcccttactgggaagctggatactgacgcatttctcatggcaggcgattttcgccactctgttcgtgattacgttgttgctgatgttgccggcgctgcgtttaaaaccatcggtaaaagcgcgtaccgaaggacaggataaactcactttcgcgacgttgttacgctctaaaacctatcgcggtaatgtgctgatttatgccgcctgttccgccagcttttttgcgtggctaacagggtccccgtttattctcagcgcgatgggttacagcccggcagtgattggcctgagctatgttccgcaaaccatcgcttttctgattggcggatatggttgccgcgcggcgctacaaaaatggcagggctaccaattgcttccgtggctgttagggctgtacgcgctgagcgttatcgccacctggggagcgggccttctgaataatgcctcactggtggagatcctgattcctttctgcgtaatggcgattgctaatggcgccatctaccctatcgtcgtcgcgcaagcgttacgccctttccctcaagccacggggcgcgctgcggcgctacaaaatacgctgcaactggggttatgtttcctggcaagcctggtggtttcatggctcatcagcacgccgctgctgaccaccaccagcgtaatgctctctaccgttgttctggcggcgttaggctacaaaatgcagtctcatgcagattgcgctgagaccggatttccccatgccaatgtcgcccacgacaagtctcactaaagacttgttaaccgctggtaattagcacgctaacaattttcggttgaatcatcaaaaattgcggcctatactgattcccggttgtttatattacgataattattaggcattaacgggaaccggagcgttcccgattcaccatggatggccttttcggcaagggttcctcccttcctctgttctacgtcggataactggctcacggaattgtccgtgggatttctcacaaagccaaaaaagcgtctacgctgttttaaggttctgatcaccgtccagtgatggagaaactatgagttcatcgtgtatagaagaagtcagcgtaccggatgataactggtaccgaatcgccaacgaattgttaagtcgcgcggatattacaattaatggttccgccccgtctgacattcgtgttaagaatcccgatttttttaaacgcgtccttcaggaaggatcgttggggttaggtgagagttacatggatggctggtgggaatgcgagcgtctggatattttcttcagcaaagtcttacgtgccggtcttgaaaatcaactcccccaccatgttaaagatacgctccgtatcctcggcgcgcgtctgattaatctacaaagtaaaaaacgcgcctggattgtcggcaaggaacattacgatcttggtaatgaccttttttcccgtatgctcgatccctatatgcaatattcttgcgcctactggaaagatgccgatacgctggaagcggcacagcaagccaagctgaaattaatttgcgaaaagctacagctacaaccggggatgcgtgtgctggatatcggctgcggctggggcggtctgtcgcaatatatggcgacccattatggcgttagcgtggtgggcgtaacgatctccgctgaacaacaaaaaatggcgcagacgcgttgcgaaggtctggatgtctccattctcctggaagattatcgcgaccttaacgatcagtttgaccgaatcgtctccgtcggcatgttcgaacatgtcgggccaaaaaactacaacacctattttgaggttgttgacaggaatttaaaaccggatggtcttttcctgctccatactattggttctaaaaaaaccgatcataatgtcgatccgtggatcaataagtatattttccccaacggttgcttgccgtctgttcgtcaaatcgccgaggccagcgaatcacactttgtaatggaagactggcataactttggcgccgactatgacacgactctgatggcgtggcatgagcgctttatcaatgcctggccagagattgcgggcaattataacgagcgctttaaacgtatgttcagctattatctcaacgcctgcgcgggtgcgtttcgcgcgcgtgatatccagctttggcaggtggtatttacgcgcggcgttgaaaacggactgcgcgttcctcgctaatcatctcccccgcatttcatgcgggggaatcttattttccgttagccaatgtcggcctgatttctgaccgcattttctcgcgcagccagtacgcgttctacggtatcgacaaccgcctgcgtttgcggatcgatctcgatattcacacgctcacccagtttttttctgccaagcgtagtacgttccagcgtttccggaatgagatgcacgcagaagcgcgttggcgttacctcgccgacggtcaaactgatgccgtcgacgccgataaagcctttgtacaggatatacttcatcagggacgcatcctgcactttaaaccacacctgatggttattttcggaggtcaggattttcgcgatctccgccgtcgtaataatatgccccgacatcagatgaccaccgatttcatcgctgaatttagcggcacgctctacgttgacctcatcacctaccctcaacgtgcccagattggtgatgcgcaacgtttctttcatcagatcaaaacttatctggttgccgtttatttcagtcaccgtcaaacagcatccgttatgcgctaccgacgcccccgtctccagcccctccagcatgtagtccggtaacgtcaccacatgggtgcgaaagttgggtttttcatcaatcgataccagtttcgcggtaccctgtacgatccccgtaaacatatcttcaactcctgaaataaataaaagcagaactgttcagcacaatagcaggtggaaaaacagcttgccagcaatgcgccgttaacaactgttttttcactggagaaatagtaataccccgctacaatagactgaaatttcccctgctatttcttttggctgccactacggcggctttttagtctttcatataacaacaaaataaaaggtgaatacgtgcagaagtataccagtgaagcgcgtcagttattagcgttagcgataccggtgatccttgcgcaagtggcacagaccgcaatgggattcgtcgataccgtcatggcgggaggctatagcgctacggacatggctgccgtcgctatcggcacctctatctggcttcccgccattttgtttggtcacggcttactgctggccttgacgcctgtgattgcgcaactcaatggctccggccgtcgtgagcgtatcgcgcatcaggttcgacaagggttctggctggcgggctttgtctccgtgctggtgatgatcgtcctgtggaatgccggatacattatccgctctatgcataatattgatccggcgctggccgataaagccgtgggttatcttcgcgcgctgctgtggggcgcgccaggataccttttctttcaggtagcgcgaaaccagtgcgaaggtctggccaaaaccaaaccgggtatggtgatgggatttttgggcctgctggtgaatattccggtgaactatatttttatctatggccattttggtatgccggaactcggcggtatcggctgcggcgttgcgactgcggcggtctattgggtgatgtttatcgccatgctttcttacattaaacacgcgcgttcaatgcgtgatattcgtaatgaaaaaggctttggcaaacctgatagcatcgtcatgaagcgcctgattcaactggggttgccgattgcgctggcgctgttctttgaagtgacgttatttgcggtcgttgcgctgctggtttcgccattaggtattgtggatgtcgccggtcatcagattgcgcttaactttagctcgctgatgttcgtactgccgatgtcgctggctgcggcggtaacgattcgagtgggttatcgtctgggccagggctcaacgctggatgcgcaaaccgcagcgcgtaccggtttaggcgtcggcatttgtatggctgtggttaccgctatttttaccgttactctgcgtaagcatattgctttgctctacaatgacaaccctgaggtcgtggcgcttgccgcgcaattaatgctgctcgctgcggtttaccagatttccgactctatacaggttatcggcagcggtattctgcgcggttataaagatacgcgttccatcttttttatcacctttaccgcctactgggtgttaggtttacccagcggttatatcctggcgttaacggatttggtggtggatcgtatgggaccggcaggcttctggatggggttcatcatcggcctgacctcggcggcggtgttaatgatgctacggatgcgctatctacaacgtcagccgtccgccatcattttgcagcgcgctgcgcgataatacgacgatagccgtcgcatggcggctattttctcgacatgttgcatatttccaccgcaatcaggtgatttcaggaagaaaattgcgatttccctcttgcctcattgcggttgtgacgctaatattcgtccccgttgtcacctacaacgttgcgttcatagctcagttggttagagcaccaccttgacatggtgggggtcgttggttcgagtccaattgaacgcaccatcattttaatgcgtctgtagctcagttggttagagcaccaccttgacatggtgggggtcgatggttcgagtccattcagacgcaccaatccattatcttgtttaattttaaaatacgctatctggtgcttgtgccaggctaaaagcgattattttcagtctctcacctttatcgtcaagcactgctctatacgctattaccctcttaaccttcgcagtggcctgaagaagcataccaaaagcatttatggtgtttcggtagaatgcgcataatctatcttcatcaccatacgtaacaaggctgcaacgggttcaaataacgtttcaggaattttatctccgcgttccacttcaaaaaataatgagcgggccagctcaacattttcaacaacggggatgcagttgcgttcagcgatgttaacaatatagttagcttgagcatcactgcctttttccaggacgcgtggtattggcatatcggtgggatgatagccaagacaaaccgcaatatgcgttggattacgcactaccgcaacagattgtttaacagattgagctaaactcccactttgtatttcactctgcatttcccgacgccgtgtcttcatttgaggatcgccctccagatctttatgctcctgttttacgtcatctttactcatttttagatcttttctaatcttataatattgaaaagaatagtccagtatgccaacgacgatataaaaagccatcaccccaacccataaccattttattaaagaagaaaccacaagcaggccacaggctaacccacagtacggtagcgcccgaaaagtactggcataataataaaagaaaaaagcaaagataagagatagcatgataactttcaggctggatttacataattctactacgctatgtaaagagaatatctgcttaaaattacttaccggatttatatgctcgcttttaaaacctatggctttgctggcaataaccacccccacctgaagaaacacgctacccacagtagcaactattaccccagcgcccagaaacagcagtgcagaagtcagtgactctattaaagcatgactcaattgcgttaatgcataagaaaatggtttatttactaattgtaatgtgaaagttattgactcaatcagtatcaaaatcatcttttcagtaaagaaatgaaaatacaaataaagcgcaatcagctgaaataatgatgttatttcaatacttttgacaacctgcccttccttacggccatcacgtaatttcttttctgtaggctgttctgttttctcgctcatacagatggaaaccagtcttttagataaatataaaatttatcgctttcaaccaaatagtgatgaagagcataagggaatgagatcaggagcgtcagtagaaccaatatacttttgagcggcattgagaagaaaaacacattcaattgttgtgccgaccgatttaaaagacctaaagccagatcggctaataccatacatattatggcaggaagagagaagctgatacataattgataaagcgttctccactctgcctggatatattttaaaaattgctggtcaaataataaagtacgccctggtggtaaatattgatatgactcatacagaatgtttaatataaactccatgccgccgcttataaagaaaataacacacaagaactggctgaaaagcaagccaaaaagtgaggtttcagcttctattgtagaattgaatatcgtacccattgtcgcgccacgtaaagtatcaagcagaaaccccgccatatcaacggcccaaaagggaaccgccgcacaaaacccaattaaaaaaccaataatcacctctccggtgactaaccctaaccagctgtaatctttaccaatatgcatcataatcttctgctggtaaatgattggtaatatgggaaaggtaagtgacataagcacgccattacgtaaaatcgcggaccctaaactgccactttttaataggggaagtaataaagagaggctcaatggtcgaataaaagccacagccaatgcaataagccactcatttacctgttgtgccattcaaccatgctctccaattcgtaacattatctgccgggtataattcaacaggataccgctaagccatgggtagctgaccattaaggttattgcaattgccaataatttaatcatgaactgtagcgtttggtcctgtatttgagtcaaggcctgaacaaggcttacgatgacaccaactaccgatgccaccaacaccaccggcatagacgtaaaaaggacgatccataaaagttgcgttacaaattgcgtcaattcagaatcattcatgaaaagctctgtaccaattgcgccagtgtcagatcccaaccgcctgccagtaaaaatattagcagcttaaacggtaatgaaatggtcattggcgataccatcatcatccccatagccagcagtatatttgaaataagcaggtcaatagccagaaagggaagataaataagtaatccaatccgaaatgcctgcgtcaactgactcaccgtaaatgccggaattaatatgagcaaagaatcaggttttatctttctttttatgtcttcaggccaggttcgttttatcaaactccgaaaataattggcttccttctcttcagagtttttttgcaaaaactgtcgataaggcgctaatgctttactgtcccactcagacgtccagaaaggagcgccagcgacctgaaccggatgccagcgctcttttacagctaatagcgtcggccccataatgaataaggaaagtacaagcgcgaggccatacagtgcgatatttgggggaacttgttgaatacccagagcatttcgtaaaatcgaaaataccaccgccagtttaaggaaagaggttcccatgacgataatgagaggcagtattgaaagcagaaacaatataccaatcagttgcaaaggcgaatcgggtaaagacatactgtatctctcatgacacgacctggaacgctattatattgttcgcatattatttttcttatcaggtttacgctgtatttttgcaaagataccaacgtgtaatacgcaccataaattcattgccacaggcaatcaactcaccttgcccaataatacggtcatttactcttatcgtcacctctggcgcaaaacatccacctacaggcaaaacgtcccccgttttaagttgtcgtaattgtccaatttccagactcgcacgtccgatctcaaagagcacctgttgtggtatctgctcaagttctactgaagatgttccgtcactctttgacattggactccctgacgcaagtagcgtttcgatatcctggactaattcatcaaatttcatcgtgttatcctctgtcagcaacaccctcgcgtagatccccccaggtagttgaatagcaaaaaaaccgagtctgatgtcgccaaagcaatgaatccgaacgcccatgccgatttcgatagactcaagttcaattaacgtaagctggcaccagcctaaatatacagggactactacaggaggggcaggataaatctgttgtcgcgcagcagaaagctctccgactatattgcgcaaaaaacccgttggccatgtaaaaataatgctatggaactcatgttcttcaactgtccatttaatatgcaacgctagctgatgtggtagattactgcaggatgttggcggttcgttctgacagagggttgcatcactggcttgcaataacggcgccagcccccattcagctattccatatagcaattcaggatcgatagccgatcgattagcggtgccaattaacccttcacaccagcgctgccagcattcttctgcaatccacaccctacccagctcattatgataatttatggtaaataatgtcccttgctgtactggatattgttgcatactcaatgtcagctcaccaatggtagcgccttgcgttggaagcatctccatccacggacgctcttcattcgctattcttaacatagaatatctccagggaaattatataccccatatgcagcaactgagactccagccactgctttagcgctttcatcgaacggtaaatttcatgatgagggacattgattcttaactgaattagcccccctgattcacagacttcacactctacaccgtcaagataaccgccactaacacgataacgttgcgtgaaaaccacgttcttattcaatgctgcaggaggattattctcaccaatgggtaatgcctggtgcatgagttgttcaaagtccatacgttccgcctccgcctcgttatcatcctgataagactggcatggcaacccaagacttccctcaactttggtaatacgcatcgcttaataccatagtaattttttctttctttttcataagcgcattaaaattcttctgtaattcgcttcgccgggagacaagctgctgatactgattctctaactgctgccgttgcgtcaaaaagctctgcgcctgagtgaataacccggccatttgttgtttcttatccaacaataaatgacaagataacgtaccttgccagcccattaattctttcagtctggtagacactgctaaagcgcgcgtctggcaaatctgctgttccgtaataatcgtctgttgctgctgatcaagtacggtaagcttgccgcgtaattgcttttcacgccgcgcgattatctccagcaaagtttccatgatcactcggtgagtatttggtgtaatttttctataagtagctcgggtccgcatacttcatccttactttgtcgcaaaaatgtgcaaatatccggataggtatcaatggctttgtcagtatcagtatcaactcctcgctggtattccccaatgcgtattaacagttcaacctcctggtaaagcgccaggcgccgccgcaatatcgccgccagttgacgatgctcatggctggtaacgactggaaaaacgcggctgagcgttgccagcacgtcaatggcaggataatgccccctctctgcaagccgccgggatagcacaatatgtccatcaagtagtgaacggacttcatccgccaacggctcattcatatcatcgccttccaccagtaccgtataaaatgcggtaatactgcctttttcccccattcctgtacgttctaaaagtcgtggcaatgcactaaatacgcctggcggatattctccagaaactgcggtctctccggcggccagagcgatttctcgtgcggccctggcataacgcgtcagtgagtcggcaagcaagacgactcgctttccattatcgcgaaaaaattctgctatcgtggtagccacaaacagcgccctcacgcgctctaaggcgggtctgtcagaggttgcgacaacaatgacacagcgttttcgggtctcttcagacagtgtaaaatcgatgaattcgcggacttctcgtccacgttcaccaattaacaccagaacattgctgtctgcgtctggcgcattacacagcatcgccagaagcgtgcttttccccacgccaggagcagaaaaaatacccactcgttgcccttcgccacaggttgcaacgctatcaatagcgcgaatccccgtcattaatggttgagtgataggctgtcgaaccattgcgggaggaggcattgcatcatagtctttccagcagacgtcgggcagttcgcggccatcaaggggacgaccaaaaccatcaatgactcgccctaataacgcttcgcccacgggaacctgatggcgtcgccttaaggccatcacttgctgcccgcagtgaagtccgattgtactcgtaaaaggagatagcaaagctttgctgccattaatccccacgacttcagcaagttcttctccaggctttatacagcacaactcacccataaataccccaggcaaccacgcatttaacaacgttgcgctgacatcctgaattcggccccatcgacaataaccatcggggggcggatatttcagcctcagacgttgcatcaattcattcttcattgtccgccaactcctcttcgctaaggtcaatactttctaccacttgtataaggctctcctctcctaattcctgccatgacaaaatcggtacgtcgaacaaggtggcttctgtaatttttcgcaagaaacgtcgggtgtcgacagaagtgacaatgaataatttggctgactgcttcagcgcctgctcgataagttgcaggatctgcgtcttatgacgagacgacagcgcagtataggtccccattgccgtctggcgaatggattcacgcacgaggttctcaataccttcgccgatccgcaaaatcggcagcggttttccttccggattaagacgacgcagaatatgacggcgaagcgcgatacggacatattctgtcaacatcaggacatctttttcacgtggcgcccagtcaattaaggtgccgaaaataagacgtaaatctctaatagaaacccgttctgatacaagccgttgcaaagtttcagcgattttattaatgggtaactggcgttgaagctctttcaccagctcagagtagtttttttccatcgcattcattagataacgcgtttcctgaacaccaataaactctcccatatgccgaagcaggacacattttaataaggcagagatacgttggctgcccgcgaaaacgtccagtccaaaaccttgcgccttatgggccatgtcttttgtaagccaacagatctgccccatcccgttcggtaacgtctggctgtcacccaccacactagcgtccgcgcctatcaataaataatccgcctgagcgggaatagataaactaaatacgggttcctgatatagcagtaccgtcaatttttcggtgggttcaggcaaaacctcaatattcacctcagggagagggacgccggtatcctcaaataaaaaccatctcatggcgtcaatatcacgaatcaggtcggcagaatgtaacgtcgggctaagacgtaagattagaggacatgcgccgggaaccatactatctttttccggtgcttcgacgccatttgcggaaaccacagactttttgcggcgaatgaggataattggcaatgctaacaacgctgaaaagaaagcgagagtgataaaaggaaagccaggaattaaagcgaggagcattaaaaccacagcggttaatatgagcgactgaggttgtctggcaatttgagaactcaactctgtcgccaggttctggcgtttctcacccgggacacgggtgacaataattcccgcgctaagggaaatcagcagcgatggaatttgcccacataaaccatctccgattgacagtacgctataagtgtgaacagcctcactcatcgacatatcatattgtacgatagcgataatgataccgccgataatgttcaccagaacaacaataataccggcaatcgtatcgcctttaacaaatttcatcgcaccgtccatcgcaccgagaaagcggctttcctgctggacatgctgtcttaatgtacgggcatggtctgcatcgataactccggcacgcaaatcgccatcgatactcatttgtttgcctggcatcccatcaagcgagaaacgtgcgctaacttccgccaccctctcgataccttttgtaatgacaataaattgcacgatagtaatgatggtaaatacgaccaacccaacggtgagatttcctcctacgacaaacttaccgaaagcatccacaatattaccggcattatgttgtaacagtaccagccgtgatgtgctgattgtgagtgacaaacgatataatgtagtaataagtaataaagacggaaataccgataaatcgagagggtcactaagataaatagcaattaagagcaggatcactgaaaacataaggttgatagtaatcaggatatcaaccatccaggtcggcaaaggtaacagcatcatcacaatagcgattaataacaccgtcgccagaaccatatcctgccgacccgcgcatacactgagccactgttgcgccctgactccctcacctaaccatgaacgcattgcgactccagaaattttatttgtcgatgatgtaatcgtaaccagagctcggcggagctggaaagaggtggagaacaactcattgcaagcccatcgcgcaacaaaaataatcgttgaggaataccctggaacgctgcgggtttccagttagccaacgctttaaaaagcagttcttcgtctaagaaggtttgcttgagtatctgacataagtgaatacgaccgttatgatagtttagataggtttcatattgtccttgccgccagaacatattggtcgctaaaggccgttcagctaatcctgctaattgaataaaaagctgaatattacgttcagtaatgagatcccaatccatcctgacgcctcatgatgagccagaaagccaatttacctaaatattgaaagccaggtatcagaataaaacctgatttatctttacttcacgaagcgtttcgagaatttgttcacgttgatcttcgtcgttaaaacagttatcgggtatcagcataaactgcgcatcaagttgttggagtaaccgattgaacatcttcgatgaagaaactatagcggtaagtctatcaagcaaccaatcactgaaaagccagcgctcacaaataatatcgagtagtagcggcagtaatgtattaggcggcaactggcaaatccactcctcacgctggcactctttttcaaggccaaggaataacagcaaacgacgcaaacgtactaatgctgcggccaaacgactttgctccgagggttcgatgcatatgctaagttcaaaggctattgctcttagcaaaatacggacccgttcacagcgatccggccagtctgccacgcgtctgaaccactgcgataagggcatttcatcgttgtctatcgcctgttgcataaaacgcttcagcgaggacagcgtagcggtatccacttcgccaagttccagtaaactaaaaacggcaagttcccatccctcctccgctgtaagcgtatccagttgcgattgcaaatcgcgttttttcttttttgacaacccgccggcagtaagcgccattgcaagagcgataatttgatacgcattctgtaaatcaggatcactattctcttcggtaagcggacgcaacgctgccccattatcctcctgtatttgttttatcaaacgcagcaaagcctgctgcctgcgctccagtttctcagcatcagtgaatttattactttcgcgcagtttaccactcagcgccattcctatttcttccatcgtctcatagagcgctgcccccgtcgtttcctgtaactcctggagagctaacattgaaggcgaaataacctcttgttcctctataacctggccaggggtaaatgctgtagggggcgtcatttttatctcattaattttaatattcatcgctacctcttttatcttcaccattacgtaaccatttcagtaacgcgttgaaatgacgagaaagtgaaaactcaacggcatatcgtgttgaggaaagttcagcctgatcgggagagaaaccaggctcgataatcaacgtaaaccgcttgccaaaagtttcacgcatcaatgcctctttttcaggatgaatacgcaaataaagcgctccctcttccgccatagccgtggcctggcgtgccagacgatggcacataacactgtctaccgactgttggtcgaaccaggccaacagaacctgttctatactatttttaatatgatgcgctgcgtgatcgaccaatgaacgaaattgattttcatcttcttgtaaatgttttacatgctgttccagccattccacttccattttttccagcgtatttttacgcaagcacgctagttcttgttgctgctcaactttctgttcacgctgataacgataggcgtctcggatgattttttcagccttacggtaagcggagctcacaatagcatgtgaaactctcttagcttgttgctcttgcgcaaataaagttaattgtaatgttatccactgtgactcaataatatttcgagcgggtagcttatggttaatttccgtcagaggaagtgaagtaaaactcatagcaaatgctccatgaagataatctcggtaagagaagtcttcggccaaagtatacgctgcggagggggtaataatactaatagcgcatgtaaaaccgcatcgtcatgcgcttcccgattaagaatggcggtaccgatctgcaatgcagtttgttgcatcacttgcggaggaagtaatttgccatctctttgccccaaccaaccatatagctgccagatctcatcctcgctaaaccactgtagaagcaattgccgatactctggtagcataaaatagtcactacacctgagtttgaataatcccagcccaaaggcaaatgccgatatacgcggcgcaagacgaacctgccgtttttgcctgtcatttaaacaggctggaataacagagcttcctcttagtctatttaacgctctgtcaagaagacgatccaactcgggccgatcgccataacgccagcagtttgaaagatgaaagcccagcttatccagccattccggtacagcgtaacgagcaggttgccagaaataacgataaagttgcaacacctcgggatcaggtcggctcaaaaacggcgtctcaggcaaaaatagccgatcaggatgcccactcctaataacagtcctgtcaacgataacatcaactgataagggtatttcatcaaccacttcaccaccttccctttattggcgttgataacgtccataatccagaatgtttgtctcgcgggtacgtcagctaccattctgaattcagcaggctgcatcaagatactaatcttactgtattgcaacccagggattgacatctctattaaatccttaatttttacccgaaaggcctccatattgacctgtggtgaatattttataaatacggcaactgagctcggagaagcgttacttccctcatcataagtcggtagcgcaatggtcacttttgcattaatcacgccctccatctgactcagcattccttcaattctttgttcttttaaaaaattaatcttctgctgttcttcctggggtgataccactaactgattagccggaaacatcttatccgccgttgtaaactgacgatgcggataaccgttaagtctaagtagctcaaccgcattaataaactgcgactgctcgacacgtaaggtaacaccgtcctcttcctgttttttttccgcatcaatatgatgctgcataagtaatgccagcatttgattcgcctcatcctctggcaatgagcgataaagatccacatcacatgccgtaagaaagaacgtaaggacagtaagaaatactatacgatgaaccttcatgccatgttatccagcttattaagcgcttgcgatgctgcgcctgatattctggcaagataatcgacgcctaccgttaactgcatataatccatttgtctggtcaacataacctgcggtaataaagcactggcgttactggtggatgcttcatctttcagcaattgttcaaaaaaattaatttgctcctggctcggttctgcagaggactttacataagattgagtgcttacaggcactacgctcatatcagaaatattcaattttcaaacccctcatttggtgcaggaaataacagacgcagcgccatagcctctggcaaatctatatccgataaaattttcgcggcttttagcggctcatttaaacccgccaacaataatgccagacataccaactgtaattttttatccggaacaataaccgttagcgctggtaacatcgcatgtacctgggaaatcaggctatggttaacgcccgcaaacatgatttccagcagcaaccgtcgaacatcgtcgctaataacttcagattttagcaatgattccactaagcatatccttgatcattttgatcagtgaactttcgtaattaataaatgtagaatactgctgtaaggcaaattgcgctttaatcatcgattctgggttgagcaaatcattaccattcattttgtcattaatggcctggcctgcctgatgcgccatgtgggagagcatatccactaattgtgcaatatccataatgcttttccttaaaataaatacatcgtaaggatactggcaacatagcaaaatttagaaagcaatgaacatccggtatatacctgaaaacgattactccggcgcacgttgttctggcgttacctgagccagcaaacgatataatgggctgctgacctgcataccggtcattgccatcccatccataccgaagcgagtaaaactcattagtccataggtaatatcattaagacgctctaataaatgaggctgtagtcccaaactaccactccagtatgaatgcgtcattaccgtcgcggttaaggctaatctaccgcccagggagacggctttagcaatcgccatacttttgcgttgattggcgaaacaattagcaatataaaaaacggcattgcctatactgtcgtgagccataggcaaatgatgtttatgatggtagataagacaggcgacatccgcgatggcaatagcaaggccaatccctgccagggctacgagcggcgcgcctccaccacttagcactgttaatgctattccagcggaacagcataaaatctgtccgcccaaaataaccgtttgccaactaaaaatttcttttggaaaacactctatcactcgtttcgcaagtccggccaataaccgctcttttccttgttgaggacctattctaccactctccatattggtttccggatgtggcaatgagggacatggaggtgattcctcaggcgcgttaacaggacgttgccctcctacctgagcatttgggctaacaggtttcatggttctccccgagatgtatgaccagaactgtccattaatgcaggtgcagtagcagattgacagagcgctgccatttgttccgccaataacgcactgggatcggcataaagttcatcaacagaattttcctgatcgtcgccagaggggcgggcaaggcaataatccagtaccgcacctatcgccgtcaggctaacggaggtaattacactccccatgtccaaagaggccgcaatattttcagccgcgggcagtggaaactgtaggggtaaaaccaacatagaaatagcgattcctgaacgtattaataaagaaagacaattagcaagggtgttagcgcagttaagacttgccccacattttaaggccagcgcactgaccacaagagcaacgctatcactggcggtttgtaatggctccttttgctgacatatcgattgataattatgatacgcacagcaagcatccccaatagcaatcacgagcgccgcccccgcaagaatagcaatgggtaatcctgccccgccagaaattaccgctgcagcaaccgataacccaaacacgactgtcgcacccagcgcacgaatagtgtattgcataaaatgtatagcataatccctctgctgccttatttgttcaggcgtaagcagcacaggggctgcgggggtaccaggcgctggaatttcagggggaggaaacgatacctccttcgcttgtatatcggaaggaggactattaccatcgactatattacttgccgctgacggaatatgaattttcatatttcgttctgttatttaagcaataagagtatcaaccattatttgcgcattctggcgaatctcactccatgaggcatccgcataactcatcttgattgcggtttgaaaagcctctctcgccaacccgggttcccccatcattttgagacagacgcccgtttggtaaaccggttctggatggctggcatccagcatcaaggcatgtccatagaaattaatggccgtcgtgtattctttaagcatcatccaggtgccagccaatgcaatatgggcacgccaactccatggctgggccatcaccagccaactaaaatcgattacggcgcgcgaataatccccctcctgccatgaggcgtaaccactggcataaacggtttccggatcaacggataatagctgtttcagaatgtcttcgggtattttatttttctgatcttctttcatcatcatacctattgattgttattttcacgtgataatgatttacgtcaggaaggtcatttaaaaacgtcgctggataagatgctcggcggataaaactgtccagttatcgccatcaagctgtgtaaaggtcgctcccattactgtcaggatgcgcaataatttcctgcgtagcatggcttttttttcatccagaacgtcggtgattatcaacatctttaaacatgttaactgcgggtgatgcacaaatatcccgcgtaaaagtcccagtaagtgaaacaattgctgtggtcgaggttgcccgggcgtcaggcgcctgaactcacaaataatcatttcttttgcctcaatacgatagatcaccaggtaaggcgataatataaactgctgcccaagtaatatggcggtctcccctaaatatgcaggctcagtaaacacctgatgccgacgcaaccattgctctatttcttgcaccatgtttacctcgttaatgcccggagtatttcagcaagaaccgtgaccagtgacgaccccacgccgatgatttgctgcataatttcagttgctttctccataatttccgtcagggatttattataagattgggccccattttgttgcaggtcggcaatcgctttatcttgatcactttgacgttgcgctacaccagcccccaggcccatgacgcccccagctgtgtggcctacggcttgacccgctataagaccggtttccccgcctacggcccctaatcctatcgtcagtacacccgacaacattgcgccacccgcagtaatcattgatgctctaaacgcttcatcaattgttttcatttgcgtctgtaaaacattgacttgcagttcccaggccagccgttgtttttctacgttatagctgcgcatgatatcgcgcagctttttggcaagctccattagcttcatccagatatcatcaaataacagaagcattgattcagtacccattccctccccggagggagatggagtggaagaaggtgttaacaaggaaggcgctggtaataccagtgctacgttactcgcttccatatttttatcctcagattaagcgcgatagccagctattctcgcctgaacgctactatagtgatcaatggtatctaatacatctctaagcgcggcaccgctccccttataaagctcctctaagcgtttttgttctatctttttctggttttctgtttgttgcattatgaaatccagaaaccgttgctgagttattaattgctctattttcttttcgatcttcgctttttctgtgttaaccatgccagtattcatctgactggcgccctcggttgcacatctgatagcctgtaagcctttaaatgaacaatccctcagtaaggcatacaggatttttttgaacatattgaagagaactttattacggaatttttttaacaggaactttccaccttcttgcacacatttttccagggcttcttttgccgcttcttttgccatggctttcaccccctctttcgtaaagctttttcccgcgcttcgcgtcatattattttctacgttacgagaaaactcggcagcctcctctgccatctcattcgccatagccatttcacgttcaagcggctcaaattgtttggaaaaactttcgctcacttcttcgccaaacttttcagccaactcctctatttctgcttcccctgcacctaccatacgctcaaccacttcctcgccaaaaccggagtcaagcacttttgcagctgcgccagataaacctctcgtcgccataaaagcacggccaatctggaaaacatccagtgccagcgcgacggcttcacaaccaaattgaatcttacttgtcacgtcaataattgcctgacaggtatcgtggtcagcaccgcacatcattgccgtttcggctccggctttaaccattcctgcacaacctgcggctatataagctacgccgctagccatttctgcgggattaccggacagaaaaccctccacaacttttaaggcgccaatcacagtttcaaatatgccggtaatccagtcaaaaatagcgccaaaaatgcccgctttacgcgctttatcctcctgctctatcgctttctggatctgctcctgatactcctttacctgcttatcacgtaatgcattttgcacctcagttgcccgctcaagctgttggcataacgattgagcgttattaccaaaaacgctgagtattaatgtcgtcatcaacattgataaaaccgcgggattggtctgcaaaaagtcaggcaatgatggacgcttatgatttccgggtacggcatcaagcagttgcttcaacgcattgcttgcctcctgaagactaattttccctgataacaggcacgcggcgttgccatcgccaaaagtagaattcacacgatgctggcgctttcccagcgaacccgaggaaacgcaactgacattgcttaagtgatgatgtgttaaggcggttactcctgcggcgctgtcgctattactgtgaattcgattcatttttagctcctgtcagaaagttgctgtaacatcttttctgcacgctgtcggagaatttgatgttcactgacctcgccgcaaatacgcaccacggcctttaacgctttgattgcataacagacgttatcacacgcgagatagcattccgctgcggcccatggcgcctgcggcgcatcaatcttaatttgtgccgcgcgtccataagcgtatatcgcttccccccaatgtttttgagcctggcagcattcccctaacctaaaccagtagtcaaatgaccaggcatcatatatcgtcaacaattgaaaaagtcgcgctgcgccggcgaactcttttacctccataagctgcatggcatagcgatacagagtattaagcggctgtgtaacatcgtcatccaacaacatacgcagcgagccgccacgccggaaaaaccgcatcgtgtcatgtgcctgttgtagggtcgggtcttttttcatgagtacgttttctgcgctatcatactggaaatttccccccacttactgataagccctgtcagttgggtaaggacagcgttaagctcctgagacattttttgaattgttatctgcccctgactcataagatcggtattccggttggcgtcattatccaaagccgctttgatcgcctgtaggccacctttatccagcttcccatgatcgccatatttagccatataatcatcaatggtcataccatcgatgagaataccattatcacgcatgtatttaattacatcctcaggcacctcctctttggttttagcatcccctttggctgctttagcaatcacctcatccatctcatttgacttttcctgggtatttctggcacgttcagcgttcttctggacttcaataaatttattatttgcgatagcctgaataaccataaggagaataagcaaaacaccatacccttcggcaaacggattttgctgggataagtcatcctggctcccggtatcagcgttgctgacgccgaagctatttttaaacacaatagggttttgacttccccataagatgtttcctgaagacattatgctttacctttttgtttttcctgacggtatctccaccggggcttgagcattaagttgtttcagtcgtacttcaagttgtttaaacaaacttactattttctttaaatccttctcggcctcctggttaaccccggcaacgccttgtggaaataggttatgaagaatactctctgtctctctgctctttttggggctctctgccctttcagcaagctgttgactcaccttagcccggatttggtgaaattttttaagacagtgatttagctgcatgtaactttgctctaaatcacgatattcactaaacgcagcctttttctttatcatcattcccctccatatacacgatagataattaacgtgctaactaagagcctatcccattagggctattttacttgccattttgaacctgggcagtgctcaaaatcctcacgtactacgtgtacgctccggtttttgcgcgctatccgtgtccaaactggctgcgccaattaacgcctggtgggataggctctaagatatttttactttactcttgctcactcactacaagtgcgctgttatggtaacgataataaataatgttgatgatattttcggcctgctcgatcgcttcaagcaataaggtgttttgctgatattgctgcggatcctgtaacttgccgttgttctcttctaactgtttccgggcagcccttaattgtaaaattatgcctttggcctcttcacgcgaatgaagcagcaaatcttctaaccgggtcaaagttgtcattttccactcacttaaaatctaatggatagttaatcaaagtatcataatgtttaatcgttaccacatcggcactcagatggacaatttctcccccattgggtaacaatgcccctacacgtaaacgctctttattcgtcagtaataagtaattaccatggcgactctgtacaaagccagccactggcgcaggcagatacttgctttcatcatgggaaggcgcaatatcctgataaattaaagaaagagcgggatcctttttctttaatgctgctaacgtttcttgcaaaatgcgttgatgagattcatccagtacaccactgataacaaaagagcgccgcattggcgtaacattgacaagccccactaaaccgttctctattatcgcagaaataatatcatctccctgagactgatgagagtgactaatctgccagtgcaataacccgggaatatctgcaagtaatggttgaaccttacgccattgctgatccatttgtatatcatcatgaattaacacgctccccggcccttcgctggatacttcagcatgcgggtaacccatttttatcaaaacatcctgcacttctcgtaccaataagtcatcacagattacaccatcccgatacatgaccccccatgattcgagagtcgctctcaccttttgcatctgttcgcttgacgagcaataaccggacaactgcaggctgccatcttctttccattgcgcccgcacataatgaatattgcttttgtctaataaaaacttaacccgcaaaggtaagtcatttaccgtttcaggctgaccactaatacttaacaggacacccattccaccgatgaaaatcaagaatacgccagccaaccaccagtaccctgatctggaaacgggtatttgataatcagcaagttcacaatcctgtttaccaaacgcgatagccactcccgcaacctgcaaaaccccactggatggtagcggcttatttggattaaatctgcggccattaactctaactctggctttcccggcatcaacaaataaattatctgcctgttctctcagaataattttttcatttatagtaagcggaatacaaatatcgcatcctttctcccccagtgacaggttaccttcattcagccatacttcccggccttgtaaaacgtgacctaaaaaacgtattttccaggaactctttggattaaccatgagatatgccattatttactactgaggctttaatcaaaaaaagcctgattacactatgtacttgagtcgtatcattgcgaaacaaatggcctacgacaggaatatcgcccaataaaggaattttattttgcgagtggatttgtttaccttgtttaaatcctcccagcaatagactttgcccggccaataatgtggcctgcgaagcaatttcagaattttgcacttcgggcagcgggtctgtttcgctttgcgtatcactttgttgtccatcctgaatattaagattaagcattattttttgcgtgccattatcatttaacaagcgaggtgtaacgcgcaacaaagaacccgtagtgatggattcaagtttagccactttttctccctgcagtttggtatagaaagtaatatttttatccagcacagcctggatattatttaaagtcaccacagatggctgggaaagtacataagcctgagagcttttttctagggcattcaaacgcaccataaagtttgaggtatcgctgattaccgttgaaaaaccgctagcaccaccgtcattcaaacctgtattgaacgcaattttcttgccacccagcgacactgccgttccccagtcgatgcctaactggttaatatctccagcattaacatcgataattttcaccgaaatctctatcatctgctggcgttgatctaattctgtgataagtttccgatacccggccatattggccgcataatcacgaacgatcactgcattctggcgtgggtcggcagcaaacatgggcaatgcctgtgtagcgggtgaaccattgttcatcgatgacgccggtacgctggttttactcatctcacgcaatacactcacgacccctggaaccacgacggactgatcgcgatattggtattgggtatccatcgcagtggcatacttaagcgtgtatatacttacactcaccgcactgtcttttcgtttgattaacgcattatccagcactgaagctaattgactaatacgagtcaggcagctgggaacaccgctcacctccacagctttggtaccggtaatttctttaacctcgcatcccggtgatgaaaggatattctggctgcgtaagtaatgaatgaaccgtccagtagataaaatattgaaagtgataacctgatgttttaataacgatgcaggatatacatataacatgctgccatcaaaccaggtaagcaaatcatattgtgctgccaggttattcaaaatatcgaccggtggtccaggcggaatttttccactaaatgtagctgttatcaatgggctaatagtaatagccgtatcatagttctctgagagcagatgtaaaacctctgctaatggcatttgtctggcataaagggtgaagtcattacctttccatgataactcatcactctttgctgtattgagtataaatagtaaaattaagattaaacgtttatttactaccattttataccccacccgaataaagtttatggtgattgcgtattacattttttaaaatgcaagttaaagccaggtgtttttctatctcaatagcaataagctcagagctactacttgtggtataataaccgtttaaccatcccccatccgctgtgagctgtatagcataatcatggacgtccgggtgtgctgcaagcagtagtgtcacataggcaagacaaggcttaggtaagctttccaggtcatttaagaacaaagaaatagaaaatgcttctgagaaaatttctcctctggcaggatgcccatcaatagtcattatccaggatcggctattaccttcggccttgatatcctgaattaatgcaatgccttttaaaactgccagcatgaatccctcctcagacataaatgggagtttctatcaaattcgctcacaaccacatccgtaaaaagcctgattcacatttatttcgactatacttttcttgtacaatatcaggatgctgtctacatataccttgtcacaggcgactctatcattcggattttccgataaattcacaattacattttcagcactgacataaaaacttacaatttgaaaaattatttattaaataaactgttacgatgtttttacatcgccatcttattaaaaagtaattgtagtcatcgactgggttatatatgaagaaatttatcttcctaatgataacaccatcgattaatcttctgatgaaactatatgtactgcgatagtgatcaagtgccaaagattttgcaacaggcaactggagggaagcattatgaatttgctcaatctcaagaatacgctgcaaacatctttagtaatcaggctaacttttttatttttattaacaacaataattatttggctgctatctgtgcttaccgcagcttatatatcaatggttcagaaacggcagcatataatagaggatttatccgttctatccgagatgaatattgtactaagcaatcaacggtttgaagaagctgaacgtgacgctaaaaatttaatgtatcaatgctcattagcgactgagattcatcataacgatattttccctgaggtgagccggcatctatctgtcggtccttcaaattgcacgccgacgctaaacggagagaagcaccgtctctttctgcagtcctctgatatcgatgaaaatagctttcgtcgcgatagttttattcttaatcataaaaatgagatttcgttattatctactgataacccttcagattattcaactctacagcctttaacgcgaaaaagctttcctttatacccaacccatgccgggttttactggagtgaaccagaatacataaacggcaaaggatggcacgcttccgttgcggttgccgatcagcaaggcgtattttttggggtgacggttaaacttcccgatctcattactaagagccacctgccattagatgatagtattcgagtatggctggatcaaaacaaccacttattgccgttttcatacatcccgcaaaaaatacgtacacagttagaaaatgtaacgctgcatgatggatggcagcaaattcccggatttctgatattacgcacaaccttgcatggccccggatggagtctggttacgctgtacccatacggtaatctacataatcgcatcttaaaaattatccttcaacaaatcccctttacattaacagcattggtgttgatgacgtcggctttttgctggttactacatcgctcactggccaaaccgttatggcgttttgtcgatgtcattaataaaaccgcaactgcaccgctgagcacacgtttaccagcacaacgactggatgaattagatagtattgccggtgcttttaaccaactgcttgatactctacaagtccaatacgacaatctggaaaacaaagtcgcagagcgcacccaggcgctaaatgaagcaaaaaaacgcgctgagcgagctaacaaacgtaaaagcattcatcttacggtaataagtcatgagttacgtactccgatgaatggcgtactcggtgcgattgaattattacaaaccacccctttaaacatagagcagcaaggattagctgataccgccagaaattgtacactgtctttgttagctattattaataatctgctggatttttcacgcatcgagtctggtcatttcacattacatatggaagaaacagcgttactgccgttactagaccaggcaatgcaaaccatccaggggccagcgcaaagcaaaaaactgtcattacgtacttttgtcggtcaacatgtccctctctattttcataccgacagtatccgtttacggcaaattttggttaatttactcgggaatgcggtaaaatttaccgaaaccggagggatacgtctgacggtcaagcgtcatgaggaacaattaatatttctggttagcgatagcggtaaagggattgaaatacagcagcagtctcaaatctttactgctttttatcaagcagacacaaattcgcaaggtacaggaattggactgactattgcgtcaagcctggctaaaatgatgggcggtaatctgacactaaaaagtgtccccggggttggaacctgtgtctcgctagtattacccttacaagaataccagccgcctcaaccaattaaagggacactatcagcgccgttctgcctgcatcgccaactggcttgctggggaatacgcggcgaaccaccccaccagcaaaatgcgcttctcaacgcagagcttttgtatttccccggaaaactctacgacctggcgcaacagttaatattgtgtacaccaaatataccagtaataaataatttgttacccccctggcagttgcagattcttttggttgatgatgccgatattaatcgggatatcatcggcaaaatgcttgtcagcctgggacaacacgtcactgttgccgccagtagtaacgaggctctgactttatcacaacagcagcgattcgatttagtactgattgacattagaatgccagaaatagatggtattgaatgtgtacaattatggcacgatgagccgaataatttagatcctgactgcatgtttgtggcgctatccgctagcgtagcgacagaagatattcatcgttgtaaaaaaaatgggattcatcattacattaccaaaccagtgacattggctaccttagctcgctatatcagtattgccgcagaatatcaacttttgcgaaatatagagctacaggagcaggatccgagtcgctgctcagcgttactggcgacagatgatatggtcattaatagcaagattttccaatcactggacctcttgctggctgatattgaaaatgctgtatcggctggacaaaaaatcgatcagttaattcacacattaaaaggctgtttaggtcaaatagggcagactgaattggtatgctatgtcatagacattgagaatcgcgtaaaaatggggaaaatcatcgcgctggaggaactaaccgacttacgccagaaaatacgtatgatcttcaaaaactacaccattacttaatattatcttaattttcgcgagggcagcaaaatgaaagaatataagatcttattagtagacgatcatgaaatcatcattaacggcattatgaatgccttattaccctggcctcattttaaaattgtagagcatgttaaaaatggtcttgaggtttataatgcctgttgcgcatacgagcctgacatacttatccttgatcttagcttacctggcatcaatggcctggatatcattcctcaattacatcagcgttggccagcaatgaatattctggtttacacagcataccaacaagagtatatgaccattaaaactttagccgcaggtgctaatggctatgttttaaaaagcagtagtcagcaagttctgttagcggcattgcaaacagtagcagtaaacaagcgttacattgacccaacgttgaatcgggaagctatcctggctgaattaaacgctgacacgaccaatcatcaactgcttactttgcgcgagcgtcaggttcttaaacttattgacgaggggtataccaatcatgggatcagcgaaaagctacatatcagtataaaaaccgtcgaaacacaccggatgaatatgatgagaaagctacaggttcataaagtgacagagttacttaactgtgcccgaagaatgaggttaatagagtattaaccaggggcgtccgatggtattaagcattggtcatattttgatgagccttacgccacgcagtattgctcatcatcgacaaaatccatacggatgccctggtatgccgcaccatttatcactaccttagtcttcatttgatcatgatatagtagaatccccttatttaacgggctttaccatgtcgtattctataggcgaatttgccagactatgcggtatcaatgccgccacgctaagggcatggcagcgacgctatggtttattgaaaccgcagcgtactgatggcgggcatcgcttatacagcgatgacgatattcgacaagcgcttagcatcctcgactgggtgagaaaaggcgtaccgataagccaggtcaaacccttactgtcgcgtccggtcattcgcctgggcgataactggataacgatccaggagacgatgctccaacatctccacgaagggcgaattgacgcgctgcggctgttgatttatgactgtggccgggaatatcctcgcgcagaactggtgacccatttattgcgtccgttgcgcagcaaagtgtccgcgcaccttcccgccgtgatgacgctgcgcgaaatactggatggcatcattattgcttacacctctttttgccttgaaggcgacagaaaagcgcctggcaacaatgcctttattagcggatggcatctctcggatcactgtgaaatctggctggaagcgttgactcgtaccggacaagagctgcggctcaatgtgcttccctctccaccagccgcgctggcgcccgagctgttcgcccagagaaaatggttcctggtgaccaccggaaagctcactgccgggcagaaaaaacagcttgcccagtggcgcaacgtggtcgcttcgctggaggttatcacgctataagcgctgaaatagatttcttcccttcattctatcttattgatatttaactacgcaaaaaaaatctccgcgaaaacttagacaaaaaaacaaagttgtgtaagttttaaataagcgtgagataacattttgcgccattggcgtcagtcgtcgtactttcaataagggggaatcatgaataacaaacccgtagtcggcattagcggatgtctgactggcgccacggtacgctttgatggcggacataagcgtatggattttgtcatgaactctctggcgccgtgggtggactacaaaccgatctgcccggaggtggcgatcggcctgcccgtgcctcgccctgcgctgcgtcttatccagacgacctgtggcgacattcggatgcgctatagccatgccccgcacgatgacgtcaccgagcgaatgaatgcctttgccgatcggtttctgccaacaataggcgaactggcggggtttattgtgtgtgcaaaatcgcccagttgcggaatggagcgcgttcgcctgtatgatgaaaagggtaacaggggccgcaaagctggcacggggctgtttaccgccgcgatgatggacaaatatccctggctgccgatagaggaagatggtcgcctgcacgatccggtactacgcgagaatttcatcgcacgtatcttcgcgctacatgaattaaatgcgctacgcgcgcagggcttgagtcgtcacagtttgctcgcgtttcatagccgatacaaacttcagcttctcgcccaccaccaggccggctaccgcgaaattggccctttcgtcgcgcgtctgcatgagtggggcgatctggatgccttctttgtccgatacagagaaaaactgatggctatcctgcgccaccccgcttcacgtaaaaatcacaccaatgtgctgatgcatatccagggctattttcaccgcgcgttgaacagcaggcaacgcgcggaattacgcgaggtgattctcggctaccgggcgggccaactacctatcctggcaccgttaacgctgctgaagcactatctggcggaacatccagatgactatctacgcagccagaattattttgagccgtaccctgatacgttagggctgcgcttagccatcacctgataaccctgcgcatcgctaacggcgggcaaccagcccgccatggtgacaatcgcgacgattcaaaggcgatgcccactagcatttcgtcattgccaacaggccgttcccaccatgataccggctatgaccgcgccagagcgttaatcacggtttccatagcctgtttttctaacgcgctacgttggatgcgttgattcgccagcgcggttcttaacacgcccgcaataacaatatatttaggctcctgccccagatcgcgcatttccagcacgaccttgcccaccacccggcacatctcgcggtacagttcgtcatcttttgtcggttttgtcatacgctttactcgtcgccagctcaaaccaacagaatataacagtcttctcaattaaacaaaatttgataaaaatcaaagaaataacgcggtttattattcatggctcatacgttgttcgtattctggtctctggcgaggccattttttcgaaacgcctaatcagttccgccaggctaccggcctgcattttttccatgactctggcgcggtgcacctctacggtacgcaccgcgatattcatcgcttccgcaatttcacggttcataaatccttttgccaccaggctggccagctcacgctctttcggcgtcaactgctggtaacacagtataatctcacgacgcgccaccgctgccgatgaaaccgtcagcgcacgctccagcgccgcctgtagcggttttaccgataccggtttttgcagaaaatcgacggcgccgcgtttcatctgctccacggccatcggtacatcgccatgcccggtaagaaaaacaaccgccagggtacttccgcactggcgcaacgcatcatgaacgccctgcccatccagtaccggcattcgcatatccagtaatacgaccccggcctgatacagactggcctgcgccaaaaaatccgccccctgcgtccagcattttacgtcatatcccagactttccagtaaaaacgcgcacgcgttagtgaccgccgtatcatcatccagtagatgaattgtcgccatccctgcccccattttcatgtaagaaatgtatcgtgaccaccgttcccgacagaccgtccggcgcggtctggttcctgatactgatatcgccccgcccataccgcaccagccgctggcaaatcgccagccctaagcccatcccctctttgcgggtggtcataaacggctgaaacgcctgacgtaatagcgcctcatcgattcccccggcgttatcctgtaaagcgatactgatgccgtgttcagtgcgttcagcaacgacccataaatgggtggcgcccgcctgagccgcattaagaatgatattcgccagcacctgttccagcagcactgacggcagcgttacgcgcagcgcagcgctaacctcggtatgcagagtcactgtcggaaactgttgcgccatacgcaacaattgccagacatgatcaatcgcctcgcgaatggctatggccttccacgcttcggttagcaccgggttgccctgcgcctggctgacccagtgacgcaggttacgcagagtatccgcaccgcgttgcgcctgctggtcaatctgctccagcgccggcagcaagggatgctgttcatctgcagcgcgcagtcgaatcaggcccccctgggcataatgtcgaatcgcggaaagcggctgattaagctcatgggcaaacccggaggtcatttcacccaacacgctcatttgccgggcggtttccagcgcccgctcatgctgatgaaggactacattattacgttccagttgttttccgcgtcgacgcaccagcagcatgacccaaatataattgagcgtgagcaacaggaacgccagaatcacgccaccgaccattagctggtgctggattaaccaacttttgacatccagccacagtcggcgctgctgagggtgctgacgaacatcacgcagcaaagcttccacctgactggtcgacgctggcgcgccccagtgaaatgacgcggcggcgggcgcgttgaatagcgctcgcgttacgcgatccgccagcgcatcgcttaccgcaggtagcgccgcgaacgaccagtcaggatataacggcgtactggttaagcaaggcagtggcgtcggtcgggaaagcagcgcgataaagtcctttttattaatcaatccttcctgatccatattttctaacaggcacactggcacaattgccgcctgcaccgctttttcgcgcagcatatagactaaggcatcgccaggaaatccggtaaaacgaagatgaaaatcgcgctccgggcgtaagcccgcgtcgctgagcgctttatagcctaataaatagccgccaaacgcctgagcatcaatcgcgccgactgtcttaccgatgagatcatgcgccgtggtgatgccgctatcgcgccgggtcaaaatcacgctgccaataacattactcaccgctttcccatcgcgcgtggaacgcagggaagctaaccagcgcagcggcgcatggctgttcagttggacaaattgcgccgggttggttatcacaaactgcacggttccctggttaacggcttcctgcatttgatgcagatccagcggctggatatgaaaggtttcgcctggaagctgttggcttaatgtctttgccaacggttgccagtggctacgcgtagacgcctcgccgcgcatggccaaaataccgatattccacgtccctgcccacgcgccatgacaaagtagccctactgccgccaacaccgccaggcgccttacggttttacctctcaccccaatatccctgtcaattatgttgttttagatcaacaacaagccgggtatgtggttaaccacaatagagcacaccccgtctcgatttttacactgtaaatcatcaacattttttattcattacacatgaaccaacatcgtgacaaatgtttcattgttggcaatgtggacgggagtcaatatggacagcagtaaacggcaatttctccagcagctcggcgtcctgaccgctggcgcctcgctggttccgctggctgaagcgaaatttcctttttcgccggagcggcatgaaggctctccccgacaccgttacgccatgcttatcgacctgcggcgttgtatcggctgtcagtcctgtaccgtaagttgcactattgaaaaccaaacgccgcagggcgcgtttcgtacgacggtgaaccaataccaggtccagcgtgaaggtagtcaggaagtcacgaatgtgctattgccgcgtctgtgcaaccattgcgataaccccccctgtgtgccggtctgcccggtacaagccacctttcagcgggaagatggcattgtggtggtggataacaaacgctgcgtcggctgcgcctattgtgtccaggcgtgtccttacgacgcccgatttatcaatcatgaaacgcaaactgccgataaatgcacgttttgcgtccatcgtctggaagccgggctgttacccgcttgcgtagagtcctgcgtcggcggcgcgcgtattattggcgatatcaaagatccccatagccgcatcgccaccatgcttcatcagcatcgcgacgctatcaaggtattaaagccggaaaacggcacgtcgccccatgttttctacctgggtctggacgacgcctttgtcaccccattaatgggccgtgcgcagcccgcgctttggcaggaggtctgaatgacgcattcactcatcattgaagaagtgctggctcacccgcaggacattagttggctgccgtgggcggtacaatatttcttttttattggcattgccgcctgcgccgcactgtttgcctgttatcttcactggcggaaaaaagacgccgcaacagaagaaaatcgggcattactgattgccattacctgtgcgattaccgcaccgctggcgctgacggcggatctgcaccagactgcccgcgtctggcatttctatgcctggccgacgccctggtcgtggatgccctggggagcgttgttcctgccgctgtttaccggatttctcgctctgtggttcctggcgcagcagattaaacgattattcaataaaagttacaacgtcactaaatggttggcgttagccagcgcgctttgcgcggtgggcctgttgatttataccggccgcgaagtctccgttgtgctggcgcgcccaatctggtttagctacgccttccccgtggcgatgttccttagcgccttacaggcgttcttcgcgctgatgattgtcgccgcccgacgcgactcggtaaggctgccaaaaatattgtggggacaaatctggacgctggcggcgctggggctggttgtggccatgtgggttagcggcgatacgctttccggcacggcaatccgtcagtggattaccgtcgccctgtcagccaaatattacgctgtcggctggctagcgctgtgggtattcacgctgctgttctgtagcctgacgctacgtcatccgttatcgcagctaagacgcgtcctgctggttctcagcgcgctggcgctatgttggctgatgcgctggacattgttgattcaggtacaaaccgtccccaagttcaacgcgcaatttaacccttactcgttaccaggcggaacggatggctggctggctattctcggcaccttcggcctgtggatagcgctactgattattattcgtgaaacgctgaacggactcaccaggagattacaacatggctaatttaacccgtcgtcagtggctaaaagtcggtctcgccgtcggtgggatggtcacttttggtctgagctaccgtgatgtggcgaaacgcgcaattgatggcctgttaaacgggacatccggcaaggtaacgcgcgaccgcatctttggcaatgcgttaattccggaggcgcaggcgcaaacgcactggcagcaaaatccacaacaaaccatcgccatgacgcaatgcttcggctgttggacacagtgcggtatccgcgcccgggttaatgccgatggcaaagtgatacgcatcgccggcaatccctatcaccccttgtcgcaggaacacccgattgactcgtccgtcccttttagcgaagccatggagcaactggcgggagaaagcggtcttgacgcccgctcaaccgcctgcgcgcgcggcgccacgctgctggaaagcctgtacagtccgctacgactgcttgaaccgatgaaacgcgtgggtaaacgcggcgaagggaaatggcagcgcatcagctttgagcaacttattgaagaagccgtggaaggcggcgatctgtttggcgaaggtcatgtggacggactgcgcgctattcatgcgccggatacgccaattgacgcaaagcaccccagtttcgggcccaaaaccaatcagttactggtcacgaataccagcgacgaaggccgcgatgcgtttctgcgtcgttttgcgctaaatagcttcggcagcaagaatttcggcgcgcatggcgcctactgtggactggcttaccgggccggctccggggcattgatgggcgatctggataaaaacccgcatgtcaaacccgactgggaaaacgtggagtttgcgctctttatgggcacctccccggcacagtccggcaatccgtttaaacgccaggcacgtcagttggcgagcgcccgactgcgtgagaattttcaatacgtcgtggttgcccccgccctccccttatcaacggtgctcgccgatcctcgcggtcgctggcaaccggtcatgcccggcagcgattcggcgctggcaatggggatgatccgctggatcatggataatgaacgttataatgctgattatctggcgattcccggcgtacaggctatgcagcaggccggcgagcaaagttggaccaacgccacgcacctggtcattgcggatgaactgccgacgcttgccggacaacacctgacgctgcgccatcttacgcccgatggcgaagagacccctgtcgtgctgaataccgacggcgagttggtcgatgcgtccacttgccgacaggcacggcttttcgtgacgcagtacgttacgctcgccgacggccaacgggtcacggtgaagagcgggttgcaacgcctgaaagaggcggcagaaaagctctcgttggcgcaatacagcgaacagtgcggcgtaccggaagcgcaaattatcgcgctggcggaaacctttaccagtcacggacgtaaagccgcggtcatcagtcacggcggcatgatggccggcaatgggttttataacgcctggtcggtcatgatgcttaacgcgctgatcggcaacctcagcttgtccggcggcgtctttgtcggcggcggcaaattcaacggcgttagcgacggcccccgctacaacatgaacagttttgccggaaaagtgaaaccgtccgggttaagtattgcccgtagcaaaaccgcttatgaagcatcggaagaataccgcgacaaaattgccggcgggcaatccccttatccagccaaagcgccgtggtatccctttgtggcaggccagcttaccgaactgttgacctccgcgctcgaaggctatccttatccgcttaaagcctggatttccaatatgagcaacccgttttacggtgttcccggtctacgcgccgtggcggaagaaaagctaaaagaccctcgccgactgccgctctttatcgcgattgacgcctttatgaatgaaacgacggcgctggcggattacattgtgccggatacgcacaattttgagagctggggctttacggcgccctggggcggcgtagccagtaaagccactaccgcccgctggccggttgtcgcccccgccactcgccgaacggtggacgggcaacctgtctcaatggaagcattttgtattgcggtagcaaaacggctccatctgcccggcttcggcgaccgggcgataaccgatccgcagggcaatacttttccactgaaccgggcggaagacttctatctgcgcgtagccgctaatatcgcctttatgggcaagacgccggtcgcgctggcaaatcaggaagatatttcgcttaccggcgtcagccgcattctgccagcaattcagcacacgcttaaagctgatgaggtcggtcgcgtggcgtttatctactcgcgtggcggccggtttgcgcccgaggatagcggctatacggagcaacggttaggtaacgcgtggaaaaaacccttacagatctggaatgcagatgtcgccgcccaccgtcacgccatcaccggggagcgcttcagcggttgcccggtctggtatccggcgcgtttgtcagatggtcgtgcgattgacgaccagtttcccattgggcaatggccgctgaaactgatttcatttaaatcaaataccatgtccagctcaacagccgtcatcccgcgcttacaccatgtgaagccagcaaacctggtggcgctgaatccgcaagacggcgagcgttatggactgcaacatggcgatcgggtacggatcattacgccgggcggtcaggtcgtggcgcaaatcagtttgttaaatggcgtgatgccaggcgtcatcgccatcgaacacggatatggccaccgcgagatgggcgcaacgcagcactctctggatggcgtgcctatgccgtatgatccacaaatcagggcaggcataaatcttaacgatctgggctttgccgatccgacaagaaccattaccaacacctggctcgactgggtttctggcgcggcagtacgtcaggggctgccggcaaaaatcgagcgtatataacccccgggccggagagcgatatcgtcttatttcgtcgagggtagcgactgataagcgaacgctgtccggctgcatatactcactgaatcgtgcaagcccaactattttacgttcaccccgtcatattacatagaaaatatatgacaacactcacaaaactattttccccttctgtaagcaattaatatttaacacattagctgcgcttctgattattgacattcatttggggttacttccggttgaccgcataatctgtgattgaattcaccgcatgacaacattgccataaatacaattcaactcactacccggaggcaatatgtttaaagaagaaagacgtcatgccatcattaatttactgataaaggataatagtgttagcgtcagtaaactttcagacctttataaggttagccaggagactattcgttccgatctacgctatttccagaaatcaggtatgcttcagcgttgctatggcggagggattttaaaccgtgacgcgctgagtaagcttatcactgaaaataagattgatatctccagcactatcgccacgccaatccatcaggatgcaaaactgcgccgggaaaacccaaaaaaagcaggcaaggtgtgtgttttaggctcattcaatattgatgtttcagcaaccgtgccgtggtttccacaaagcggagaatccattctggccagtcaatttggattctatcctggcggtaaaggagccaaccaggctttagcggcgaacaatgccggcgctgcggcacattttatttttaaagtgggcaaagatcagttcagcgcatttgctatgaatcatattattcaatcaggtatcgcctcatacagcgcgtatcaaacagataaagcgcccaccggtagcgcattgatctatgtctccgccgtggatggcgataatattatcgccatctaccctggcgccaatatgatgctcaccacgcaagagattaacgagcaacaccgttatatcgccgagtctgacgttatgttaatgcagctcgaaacgaacattgaagcgttgactgaatttattcgtctgggcaaacaagaaaataaaatgatcatgctgaatcctgccccctatacgaaacaggtgacgcatttattatctgatattgacatcatcacgccgaatgaaactgaagcctcttttttatccggcgtaaccattactgatattaatgatgcgaaaaaagccggaaatattattctgcaatccggggtgaaaaaagtcatcattacccttggcgcccgtggatctctgctctgtgagcacgcccgcacgttgtatattcctgcgtggagcgccgtggtaaaagatgccgccggggccggtgacgcttttaatggcgccttagccgccgcgctggcgcgacaagcagacatggtcgcagccattcaatatgcctccgctttcgcttctctggcggtggaacaagtcggtgcgtcgagtatgcctcagcacttgcaggttttacatcgaatgcgtacccaatctaataaagtcattcacattaattaacaggtgacataatgaaaattttatttattggcgaatcctggcacattcatatgattcactctaaaggttttgatagctttacatcgagcaaatatgaagaaggcgcagactatttattatcctgcttacgccagggtaatatcgatgtggactacatgcctgcccatattgtgcaaactcgttttccacataccgccgaagcattagcctgctatgatgcgatcgtcatcagtgatatcggtagcaatacgttcctgctacaaaacagaacgttttataatatggacattattcctgatgcattacaacttatcgccgattatgttgctgagggcggcggtctgttgatgatcggcgggtatttatcctttacgggaatagaagcaaaagccaattataaaaatacggttctggcggaggtattgccggttgatatgctggatgtagatgaccgcgtagaactaccgcaaggatgtaaagcagtaaatactgcggtagagcatgttattacccagccatttagcgaatggccgccgctgttgggctataacaagcttatcgccaaagaaaatagtcaagtccttgctgaaattaatggcgatccactgttagttatgggtacttaccataaagggaaagtatgttgctttgccagtgattgttcgccgcactggggaagcccgcagtttctgcaatgggaacattacgccaccttctggtgtaatgttttacacacaataaaaaaataatattacccaggcgaatataaatttcgcctgccctgccacacactgagtcattaagaatatgaatgatacttatctctatggcgaaatgttttctgaaaacatattgacaagctatcggatttatggagacagaaaatcattactcacgccgctcattatccttcatggcggcccttctggcggctttgattatttattaaattatcgccgtctggctgatgacgggcgcatggtaatattttacgatcaatatggctgcggtcgttcaacgcattttcctcatgctgacgcgtctttctggactattgcgcgttatctcagtcaattaacccaattaattcatcacctgggtattggacacgggtattcgatactgggacattcctggggcggaatgcttgccgcagagcacgcctgcttacagcctgccgggcttcgcgggacgatactggccagttcgccggccagtatcgccctgtggcaacaggaagccatacggctctttaacgctctgacgccaatgtccgatgacgatatcaaaaacgtcattatgcccgccgtcatttatcaaaacccaccggaacagctggtcgcttattatgccagacacgtttataccctcgcggaagaagccgttcatgttcagcgctctaatgcgcagttcgccgccgaccctacgggttatcacattttatggggaaccaatgaactggcggcaaatggcaaacttgccgactgggatattacgccccatttgtgccagatacgctgtcctgttctggtactgcgcggcgaaaacgatcaggcaaccgagcgcgtcgtctctccgcttctctctcacatttcagactgccgcgcggtcactattcctggcagcagccataacccgcatgaagaaaatatcgcgccctgcctcgcagcggtaagcgcgtttttacgcgatctggcataaaaagccattaaggtatttatcatgaaaaaagtcaaaaaattgtctcttaccgatttagtgctttatggtctggtgtttatggtgcctatcgcgccagtctctctttatggcgtcgtttataatctttcgcacggtatggttgcgctggtttatattattggcgctatcgcgatgttttttaccgcgtacagctactctaccttatcgcagcatatctcctcgtcgggttcggcctatgcgtatgctggcgtatgcattaatcccgccgtagggtttctgaccggatggatattactgctggattatcttttgttccctacgctcgtggcagtgctgggcggcgtcgcggtccacgctattttaccgcaaatcccggtctgggtctggccgttgatttatgtggctatcggcaccggagtcaactatctcgggatacagcaaacggcgaaattcgataagttactggtctttattcaactcggtattctggcgattttcgtgctactcattgtccgtctgatgctgctggacagtagtcagataacgctttccttccggccttttttcgattcacagtggttcaccccagggctcatcgcgacggcgatttcggtggctgcgctgaactttctcggctttgacgctatcagtacattaagtgaagaaagcgaaggcgggggacgcgccgtcagtaaagcaacgctgttggcgttagttttggcgacggtactgtttattatcgttgtggcgtttgcggcgttcgccaccggtaatgtcgaccgcttcgcggaaggcaatgcgacgaatgaagcatttttcaccattgccggcaacgttggcggtatctggctcaaagtggcattttccatcattgtggcgtttgtgtgcgccgtcggcaacattattaccgcgcaaacggcggtgtccagagtgctattttcaatggggcgcgaccgaatgttgcccgccttcctcgctcacgtccataccacgcgtaaaacgccggattatgccattctgtttaccggcggcgtcaccctgctgctcagctacctgttttccggcaagattgagtctatctccacgctggtgaactttggcgcgcttttcgctttttttgtcgtgaacctgtgtgtgtttatcctgttcaatttccggatgaaagcccagcggcgcattttcgcccatgtcatttcgccgatcatggggatgatcgtcatcggctacgtctgtttaaacatgaacattcacgctctgatactcggaattagctgggcggcgatcgggatagcgattctgtgctatcgaaaagcacataaccaaaacatcgccatcgacctggaaggcaaaaagttgctcgattgacattatgcgcaacaacacccactgttgcgcaacgccgcccctgttcgggcggcgttatcgccagcgacatcgtaaacagcgtaataacaaaccgttgtggatctgcacagatgtcttttgaaacagggttttcattttccttttttgtaaatttcagcgtataatgcgcgccaattgtctcttgaatggtttcagcgcattggactgtaaaactcaacgactaaaattatccccttcccgttgggctgaaacgcgagcacacattcctctgcacgctctttcgatgtcacctatccttagagcgaggcatcatcactttagcaacacaggcttagcttccgggccgtgcgcgcccgaagccagatttccatatcctcctcaacttaaagactaagactgtcatgaaaaagacgaaaattgtttgtactatcggtccgaaaaccgaatccgaagagatgttaagcaaaatgctggacgcgggcatgaacgtgatgcgtctgaacttctctcatggcgattatgcagaacacggtcagcgtatccagaacttgcgcaacgtgatgagcaaaaccgggaaaaaagccgctattctgcttgatactaaaggaccagaaatccgcaccattaaactggaaggcggtaacgacgtttcgctgaaagcgggtcaaaccttcacttttaccaccgacaaatccgtggtcggtaataatgaaatcgttgccgtcacctatgaaggcttcaccagcgacctgagcgttggcaacaccgtcctggttgacgatggtctgatcggtatggaagtgaccgccatcgaaggcaataaagtcatttgtaaggtgctgaacaacggcgatctgggcgagaacaaaggcgttaacctgccgggcgtttctattgctctgccagcgctggctgaaaaagacaaacaggacctgatcttcggttgcgaacagggcgttgactttgttgctgcgtcctttatccgtaaacgttctgacgttgtcgaaattcgcgagcatctgaaagcccacggcggcgaaaacatccagattatctctaagatcgaaaaccaggaaggcctgaacaacttcgatgaaattctcgaagcttccgacggcatcatggttgcgcgtggtgacctgggcgtagaaatcccggttgaagaagtgatttttgcgcagaaaatgatgatcgaaaaatgtatccgcgcacgtaaagtcgtgatcaccgcgactcagatgctggattctatgatcaaaaacccgcgtccgacccgcgcagaagcaggcgacgtagcgaacgccatcctcgacggtacggatgcggttatgctgtccggcgaatccgccaaagggaaatacccgctggaagccgtttctatcatggcgaccatctgcgaacgtaccgaccgcgtcatgaacagccgtctggactacaacaacgacagccgtaaactgcgcattacggaagcagtatgccgcggcgcggtagaaaccgccgaaaaactggaagcgccgctgatcgtggtagcgacccagggcggtaaatccgctcgcgccgtgcgcaaatacttcccggacgccaccatcctggcattgaccaccaatgaagtgaccgcccgtcagttagtactgagcaaaggcgtggtatcgcagctggtgaaagaaatcaattctactgatgatttctaccgtctgggcaaagatgtcgccctgcaaagcggcctcgcccagaaaggcgacgtcgtagtgatggtctccggcgcgctggttccaagcggcaccactaacaccgcctctgttcacgtactgtaataattgttgtgtgaattaatttgtttaaaaaagcgcccttccggcgctttttttatttaatcgatagccactattaataaaaaaatcaaatcggattttactatctaattgcggattatctaagaagaatccgatggaagccccctgttttctttcggttttttagggactttcatgcatttcgatgcttctttgagcgaacgatcaaaaataagtgcattcccatcaaaaaaatattctcaacataaaaaagtttgtgtaatacttgtaacgctacatggagattaactcaatctagagggtattaataatgaatcgtactaaactggtactgggcgcggtaatcctgggttctactctgctggctggttgctccagcaacgctaaaatcgatcagctgtcttctgacgttcagactctgaacgctaaagttgaccagctgagcaacgacgtgaacgcaatgcgttccgacgttcaggctgctaaagacgacgcagctcgcgctaaccagcgtctggacaaccaggctactaaataccgtaagtaatagtacctgcgtaataaaaatggcgcacatcgtgcgccattttttttacccatataaccacgcaaagtataatgttattgttatgaaccgtactaaccagctgatcttaggtgcagtagttctgggttccacgttactggccggttgttcaaacaacgctaaaatcgatcagttgtcttccgatgtacagacgctgagcgctaaagttgagcaactgagtaatgacgtaaatgcaatgcgttccgacgttcaggctgctaaagacgacgcagctcgcgagaaccagcgtctggacaacaaagtagtatcccacgtccgtaagtaatttgacgcacgatataaaatggcgcacatcgtgcgccatttttttgtccgtcgtttgcgcgaaggctactgcgtcgcgcgcgtttgcccctcttccccgacaaaaccgttctgagcggattcgactgcggtcgtatttaccgctggcgtctgcccggcgctcacgctgactggatacccggctcgccggtatagcgccttatcgaccaggcgactatccaccccttgcgcgtttctgaacgcggtaaattccgcaggcaacacgtagggcatcgtctgcacgttttgctcttcttccggcgatagcggcctgtgcacctctacataacgaatgccattcggctcgacagagaatttcaccggctggttaatcacttttaccggcgtccccgttctgacctgcgcaaataacgctttgatgtccggcgcgttcatgcgaatgcaaccggaactcacgcgcagacctacgctatccggcgcgctggtgccatgaatgagatattccccattaccgtgcgccagacgcagcgcatagcgtcccagcgggttatttggcccggcagggatcaccggcggcagcgtgatcccccgctcaagcgaacgttggcgtatgcccgccgtcggcgtccacgtcgggttggggatcttttgccctatccgggtgtccatgacgggagtttccagtccctgcaaaccgatgccgatgggatacacctgaacgcggttttctcccggcgggtaataatacagccgtagctccgcgaggttgacgataacgccttccctgggcgcatccggcaatagcatctgcgagggaatggtaattagcgtaccgggcttaggcaccggcgcaatcgtattgttcgcttcaagaatgagcatcgccgccgtatcaaaacgccgggcgatagcctgcaggtttttatcaccttcctgtacggtataggtttgattctgaccaataagacggctgccttcgggcggtaatggataatcaaccgcccaggctgcctgtaacgcgctatacgcgccgataatagttagcgtaatgaaagacgcacgtttcataccaaacctcctgtattcctggtgatgccctctgcgacgactggtagcgcttcgcttatcagaacaacaaaatatacgctctgtccactctggataaagcgacgtcgccgtccgacaaaggatttgacatcaggtagaacgctgtctgtacagtttagctaagagtggcggccttagcgcgaattgcgcgaatcattgcttccagcccctgagaacgagaaggtgtgaggtgctgcgcaagcgccattttttcgaaccatggccggacatcaaaatgcacaatatcctgcgccgtcatttggtggtacaaaataaataccaccgccataaggcccttaacgatcgccgcgtcgctgtcgccctgcaattcgataatgccgttggcgtttcgccgcatcacgatccacacctggctctgacagccatgaatcgtattttgcggattacgatcctgcggatttaactccgccaggcgctgccccaactcaataatatataaatatttctcttcccaattagcgcaacgcgtaaagttacgcagcagtttttctttatccggtagcgcagccataaaacctcactgttatcccaataagcggtggatacgcgttaatcctgccaccagtcggtccacttcttcatgggtgttatacatcgccagcgaagcccggcacattgccggcacgccataccaggccatgagcggcattgcgcagtgatgtcccgttcgtaccgcgataccgtaattatcaagaaagctgccgacgtcgtaagcatggtgtttacccagattaaacgcgatgacgcccaatcgctgcgccggaccatacagcgtgatatcaggcacctgcgccagttgctccagcgcatagcgcatcagcatctgctcataatcgccaatcttatccagtcccagcgacgtcacatagtcaatcgccgcgccgagaccgatgatgccgccagtattcggcgttcccgcctcaaaacgccagggcgctttcgcccatgtcgttccctgcgtcaggctgacggtcgagatcatcgacccgcccccttcccacggcggcatttcttgcagcaacgcctctttaacatacagaatgccgatgccggtcggcccgtaaagtttatggccggagaaaacgtaaaaatcgcagtccagcgcctggacgtcaacagcatggtgcatcacggcctgggcgccatccaccagcactttcgccccatgctggcgcgccagcgcaatcatgtccggcagtgggttttccgtccccagcacattggaaacatgggtaatggccagcagtcgggtccggtcatcgaacagcgcagctaaggtctccagccgcagcgtaccgtcaggatgcaacgggatcacgcgcagttcagcgcctttgcgctcgcacagcatctgccagggaacgatgttggcgtgatgctccatctcgctgatgataatgttatccccggcgcgaatattttccgttccccaactgttggcgacaaggttaatgccctccgtcgtaccgcgcacgaacaccagttcttctgcggagcgggcgttaataaaccgcgacgcctgcttacgcacattctccatgctttcggtcgcctgcgcgcttaacgtatggatacctcgatgtaccgcagcatagccgtgacggtagaaggcagattcagcatcaatcacctgattaggtttttgagcgctggctgcgctgtccaggtaagccagcggcaggccgttaacttcacgctgcagtatgggaaaatccgcccgtactttttctacaggaaatgtcataccaggcctccgggcagtcgctggccgattcgcgccagcacctgctgtttaagggcgctatcatggatagcttccgttaactctgcggcaaacgcgtaaagaatcatgtgccgcgcctcctgctgtctgatgccgcgtgattgcagataaaacatctgctcatcgtcaatacgcccgatcgtcgcgccgtggctgcacttcacgtcatcggcatagatctctaattgcggtttggtatcgacttcagccagtttccccaacaacaggttattattggtcatctggccgtcggttttaatggcgtgttgcgccacgttaatcaggccattaaagaccgcgcgtcctttgtcgctgacgatggtcttgtgcgactggcggctgttacagtagcctttgttatgttccagccatgtccgcgtatcgcaaacttcatttttcaccggcatcgccagactattcagtcgaagcgtcgcgttttcaccattcagttgtgagctgctgtggtgacgtagtactgcggcgcccagcagaaaactgtggctaaacgccgaggcgtctgtcgccagcagaagatcgttatgcgcaaagtgatagctggacgcattttcaaacgccagtttgatatgatgcagttgcgcattgtctgcaacgttcatcgtcagacgcgcgccggtaaaatgttttgccgctgtaaggctgacataatgctcaataaccgtcgcttccgcgccttccgccagcgccagatggtggcgataatgcgcggtgttcagctcgtcgccatccacgccctgcgtgatatgcattaacagtagcggcctggtcggacgctgatttcgccgtacctgtatatacgtgacacattgcgccaggctttccgtcagatgcagaaaaacctcaggctgtaccggcgcggcaagcgtctggcgctcatccctgacgctaacgtcaaatccgctgttttgcgtgctatcactgagctctggcataaaccgaccatcgacaaacaccagccgcacggcatcgatttgcagcgccaacgcatcacgctgtgcggcgctgatagtcgcacactgctggataaactggctatgggttaagccctccagcggcgtgtatttccagtcttcatgtttacgcgtcggcaatcccagacgtaacatctgttgtaaatgttgtcttgcctgctcagttcgactttctcttttttcctcaaagagatgctgccattgctgtagcgctttactgctgttcggtaagccagccataaccctgctcctccagttgtttgaccagagtaaaatcgccggatcggacaattcgcccctgatagaggacatggacgtaatcgggtttgatatagtccagtatgcgctgatagtgggtcacgataataaaagcgcgtttatcgtcgcgtaacgcgttgacgccttccgccacaattttcaacgcatcgatatccagtccggagtccgactcatcaaggatgcacagttccggctccagcaccgccatttgcaaaatatcattgcgctttttctccccgccggaaaaaccgacgtttaccgaacgggtcagtaaatcttccggcattttcagcaatgcgatcttttcttccatcagatcctgaaaatcaaagcgatccaacgacgtctgcccgcggtaggcgcgcacggcattcagcgcggtttgcaggaaaaactggttactgacgccggggatttctaccgggtactggaaggccataaaaatcccttcgcccgcccgttcctccggcgacagttcaagcagatctttacccttgaacgtaaccgagccgccggtgacctcataatcttcacgtcccgccagggtggcggagagcgtgcttttcccggaaccgttcggccccataatggcgtgaacttcgccggggcgaatctccagattcaggccacgcaaaatcgctttttcttccacactgacctgtaaatctttaatgcttaacatgggttttccttcatcattaaccgacgctgtgctcaaggctaatcgtcagcagtttttgcgcttcaacggcgaactccagcggtagttccgagaaaacgtctttgcagaaaccgttgacgatcatcgaaatagcgtcttcttcgctgatgccgcgttgcagacaatagaaaagctgatcttcaccgatgcgtgatgttgtcgcctcgtgctccagctgcgcgctgttattgcggcattcaacatacgggaacgtatgcgcgccgcagtccgctccaatcaacatggagtcgcattgggtgaaatttcgggcgttggttgccgtcggcataatttttaccagcccacggtagctgttctggctgtggccggcagaaatgccttttgagataatggttgagcgcgtgtttttaccgatatggatcattttggtgccggtgtcagcctgctgatgtccactggtcagcgcaacggaatagaactcgccgatagaattatcaccgcgcaggatacagctcgggtatttccaggtaatcgccgaaccggtttccgactgggtccacgacatcttgctgttttccccttcgcacaacgcccgcttggtcacaaagttcagaatgccgcccgtgttgttgtcgcccgggaaccagttttgtacggtggaatattttacttcagcatctttatggatgatgacttccactaccgcggcgtggagctgataactgtcgcgtacgggcgcggagcagccttcgatataactcacatagctgccttcatccgccaccagaatcgtgcgctcaaactgaccggttttctcggcgttaatgcgaaaataggtggataactccattgggcaacgcacgcctttgggaacatagataaatgtcccatcggaagcgactgccgcattcagcgcggcaaaaaagttatcgttccccggcacgacggtgccaagatatttcctgaccaggtcagggtgatcgtgtatcgcttcgccaaaagaacagaaaataatgccctgttccgccagtttttcacggtatgtggtcgctacggagaccgaatcaaaaatcgcatcgacggcgacctctttcccttcgcgaaccggaacgccaagttgctcgaaggcgtcttcaacctctttactcaaaaaggtattcgcgcccgtttgctgtacggctcccggctgggaaacgcagctatcgtcgcagtttccgcatgatggcgcagagtaatagctgtagtcctgatagttcagtttatcgtagtgcgccttcagccagtgcggttcatccatgtccagccaggctctataggcattgagacgaaattccagcatccactcaggttcgttacgctttgcggaaatcgcgcgcaccacctcttcgctgatgccttttgccagttcatcagtgggtagttgcgtgaaaaatccttctttgtaattaaggcgtccgcctgtccagatgccgacctcttccgttgcttcagtgttacgagacatagtaccgcctataccccaaaactttcgccgcagccgcattcattctgggctttggggttatgaaatttaaataactggttcagcccttcctgtacgtaatccacttctgttccgtcaataaaaggcatcgcctgtaacggtgcgaaaagctttgcgccttcggcttcaaaaaccagatcgtctttatccggctcccgaacggtatccagaacatagccaaatccggcacatcccgtctgttttacgcttaaccgcacgcccaacatgcccggctgcttttctgccagttcacgtatgtgcgctgccgccgctggcgttagcgtcagcccttgccaggggaagtcctccgggttaaacgtgtctgaatgcaattccatagagttacctcgcgttctaaatcaccaggatataacaacatgttagtgataatgattatcacttcaaccccttaaccgcaggggctttccaacaaatggtcatattgagcgccttttattaagcatagaccctgtccgccaggtcatacaacagacaaaaaacaacttaactttttgataagtaatgatttataagatattaaccgttctggcaggtcaaaaacgaaaagatgtatagaaaatgactatttaattaataggctgtcgacattgccgggcggcgaggtcagaaccccattttttgtatggatacctggcgttgcgctctttataatccgctgcggttctataactcagtttgagctataggtttatgtaaactctttccggcatttcaggtgctgaatgaggcaagaggcttaaaatatggttgttacgctcgcgtatatcgcactttttttggttttctcgtgggtcatcttgagaattaatcaaaaaagcgattccctgtcgaaaagcgtttttatcgctatctttttaggggctgttattggtttatccctgcattttatttcagcaaatcacactaaaactattatcgaatggtacagcatcgtcggcaatggttacgtccacctgttaaaactggtcgctataccgctaatttttatttctattctttccgccatcaataaactggaaaatagcgccggcatcggaaaaatgtcgctgacgatcgtcggatgcatgttatgcctggtgatggttgccggttttatcggattactgaccgctcatgtgctggggcttgacgccagcgcttttgtgcacatgccgtcaatgttaactacagaagaagtcaataagactgccgcggtgtcgattccccagttagtgacatcgctgatcccgactaatatttttcttgatcttacgggagccagaagtgtttccgttatcggcatcgttatcttcacgctaatagcggggatcgctctgttaaaggtcaaaaaagaggcgccggaagaaggtcagaaattaagcgcaggcattaacgctatccagatctgggtcatgaagatggtacgtatcgttattgcattaacgccctatggcgtcatggcattaatgactaccgtattttcatcataccactttgaacaattcgccagcttacttggttttatcggcgcctgttatatcgcgattttcatgatgtttatcgtgcatgccatcttgctgatcctcagcggtaataatccagcgcgttatttcagtatggtctggcccgtcttaacctttgcgtttgtttcccgcagcagcgcagcctctatcccgctggccatttccgcccaggaaaaatttggcgtacaaagcactattgccaatatttccgcctcgtttggctccagtatggggcaaaatggctgcgccgggatttatccggctattatggtagcgatgattgcgcccaccatcggcattgatccgctctcgctgcattttctggccgcgatgttgcctgccattgcgctagggtctattggcgtagccggcgtcggcggcggcggtacgttcgcggcgctgattgtcctgtcgacgttgaattttcccgttgcgctggtcggtatttttattgccatcgaacctatcgttgatatggcccgcacggctctgaacgttaacggatcgatgatgtcaggtgtgctggctaaccgtattttgaataatcatacggctgacgacatgccagcggttattgacagaccttagttttttacgcgcccggaaaagaaaaacccttaagtctgttcaatacaggcttaagggttccggccccatccggcgcttatctccggcactcttaatggcttagctcttgaaggggcataagaataatctcataaagaacgcgcgcctttttagcacaaatggcgatctgtattttttttaaacaaaatcaagggggttatctattacctggggacagtgtctggtgagattgcctggtaacatagccggatggcggctaacgccttatccggcctacacagactttattaatgcacgcccaaccgccaggcgaaatagatctcttctttcagttcggttgcagagagggtgaggagatcggcaaactctaactccagctgttttaaacgcttcaaatactgcgcgggagaaagttcggttttatcacggcgtaaaaattcaatcgccagttgggtcgggtctaaatcagtagacatatcatcctcgcttatgtgtaaacgtgcacagtatatcacctttttctgcgcacattttgaccaaaagcaatatgcatcacacttttatggtgacaacgtcacacaatcgccgtagtaagacgcgaagaacagcacagacgtccctgttcatcaaagatctctatctgccagacctgatggcgagccccggtatgcaacgctttacagacgcctcgtacgcgcccctgacgcgccgaccgtacatggttggcattcacctccagccccaccaccttttgctccccctgcgtacacagataacctgcgaccgagccgatactttccgccagcaccacagacgctccgccatgcagcaagccgaacggctgtttggtgcgatgatcgacgggcattgtcgcttccagcgtatcgtccccaatacgctcaaagcggatatcaagcaggccaaccatatttccttcccccatcgcattaagcgcatcgagggtcacttcacgtttccagatcaacctataatctccagtaatgcctgcaacgggtgacgcacgcccgtaccttcaatgcgtttaacctggcttcggcaggaatagccggttgccaggcagcggtttcgcggtagacgttgcatcgcctgatgccaggatagctcataaattcccagcgaatttttatgattggtgagttcatgtccataagtgcccgccataccgcagcagcctacgctgacattttccagcttcgcgccaaaatgggcaaagatggcggcccactgcgcaggcgcgccgggtaaagccgtgacttccgtacaatgaccaaaaaagtaccacggttcgccgctcacctcgacggacagtcttgcatttatttcctgcgccagccattcattcaccagcaacacatgaaaatcgccgcgctgttcacccagcgccagtttgtattcgtcgcgataacacagaaccagcgccggatcgacgcccaccatcggcatccccaacgcggcgatccgattaaggaactcagaggtttttttcgccgttttcgcaaagcgattaagaaaacctttaatatgctgcgccttaccattcggcgagaacggtaacaataccggcctcctgcccagtttttccgccaggcggataaagtccgccacgacccgggcgtcgtagtagctggtaaacggatcctgaaccaccagtaccgttttcgctttttgctcggcgctcatgcgttccagttgctcaagcgtcatattggcagacggatggcccaccagttgctgttgcaatgaaggggcagaaagcagaggtaaatccaccataccgatatgttttttcgccagattacgaaccaccggttggttaataaaaaagttaaaggtctttggcgcacgcgccatcagcggcgcgtaggtctcgaccgtcgccaccagatgatcgcgtaccgggcgcagataacgcgtatggtaaagctgtaagaaacgtgaacgaaactccggaacatcgattttaatcggacactgggtcgtacaggctttacacgccagacagccggacatggcctctttaacttcatgggaaaagtcatactcgcctttgcgtttgtgccaactattccgggtgcgggcaatcagcgtgcgtaagctggcgcgtttttctggcaactccttttccagcttcaacggatcgacgccgcgatcggccaatagacggagccattcccgcaccagcgtcgcccgccctttcggcgagtggatccggttaaggctaattttcatcgacgggcacatcgggcttttcgcatcgaaattaaagcacaggccgttaccattacactccatagcgccgcgccaggtctgccgtaccgccagcggaatttgccgatcccaggtgccgcgttttaccgcatccaccttcatcatcggcgcctctatcccctgcggcggacagattttacccgggttaagtcgattatgcggatcaaaagccgcttttattttgcgcagctcgccatacagaacttcgccgaaaaaggccgggctgtattccgcacgaaaaccttttccatgctcgccccacaacagcccaccgtatctggcggtcagcgcgacgacctcatcggagatctgtttcatcaacagttcctgctgcggatcgcacatatccagcgccggacgcacatgcagcaccccggcatccacgtggccgaacatgccgtaacttaagccatgaccatccagcagagcgcgaaattcggcgatgtaatcggccagatgttcaggcggcacgcaggtatcttccgcgaaaggaatcggtttggcagcgcctttcgcattacccagcagccctaccgcttttttacgcatcgcgtaaatacgctcaatacccgtcaaatcggtacaaagttgccagccgatcacgcccgcttccgctcgcgccatcaggccatccagccggtggcacagcgcctcgacctgtccgtcaataagcgcttcatcgtcacccgcgaattccacgatattcaggccaagcatctctttatccggcacatcggtaatcaattcgctaacggagtgccagacaatatcttcccgcgcgaggttaaggactttggaatcgaccgtctcgacggataaggcgcgcgcatcaaccataaaaggggcgttacgcagcgcggaatcaaaggagtcgtattttacattcaccagacggcggactttgggtatcggggtaatatccagccgggcttcagtaataaacgccagcgtcccttccgaccccgttaagatgcgggtgagatcgaagcgggtcatgtcatcgttaaagacgtggcgtaaatcgtagcctgtcaggaagcgattgagctttggaaagctatcgaggataagttggcggttttccaggcaggactgatagacggtctgatagatgcggcctggcgtcgtcgtgttttcacccagcgtccgggcaagctctacgggcatcgattgcgtgtcaaggatatcgccccccaacaatacggcccgtatgcctaagacgtgatctgacgtttttccatagaccagcgaaccctgaccggaggcatcggtattaatcataccgccaagcgtggcgcgattactggtggaaagttccggcgcaaaaaaatagccatacggctttaacgcttgattaagctgatcttttatcactcccgcctctacccgcacccatccctcttcaggattaatttcaataatgcggttcatatagcgggacatatcaacaataatgccctggtttagcgcctggccattcgtgccagtaccgccgcctcgaggggtaaatatcagcgacgtaaagcgcggctccgccgccagacgggcaagaagcgcgacatccgccgtagaacggggaaacacaacagcatcgggaagaagctggtagatactgttatcggtcgacattgtcagacggtcggcatagctggttgccgtatcgcccgtaaacccttgctgctccagcgcctgcaaaaaattgagcaccagctgaacgacgccgggtgcctgagaaatttgtggaatcattatattgaccttttcctgcggtctatgttgtgaacggtggcgcccaacccggcgagcgcgagcggtctacgcacaggaagggatgcttaatcgtttgcgtgttgcgttatttgttgtatcacatttttttcctgtgcgcccaacagaattacatgcagaatcggcctgttaaaaaccgctgaaattgctcatcattatagggtgtggtttgcatgttcacgtcgcgccaacgttctggcgcaaagacaaaggtgaaaagtatttatggtaaatgttcgtcagcccagggatattgcgcaagtgctgctatcggtgctgtttttagccatcatgattgtggcctgtttgtggatagtacagccttttattttggggtttgcatgggcaggtacgattgttatcgcgacctggcccgttttgctgaaattacaaaaaatattgtggggccgccgctcgcttgccgtattggtcatgacgctgctgttagtgctgctcttcgttattcccgtcgccttgctggtgaacagcattgtcgatggtagcggcccgctcatccatgcagtgaccggcggcgatatgacgctacccgatctggcatggttaaataatattccgttggttggcgccaaactgtatgccggatggcatagcctgctggatatgggcggtagcgctattatggcgaaagtgcggccttatatcggcacaaccacgacctggtttgtcggtcaggcggcgcatatcggacgctttatgatgcactgtgccctgatgctgttgtttagcgccctgctttactggcgcggcgaacaagtggcgatgggtatacgccattttgcctgtcgtctcgcggctaaacgcggcgatgcggcggttctgctggctgcccaggcgatccgcgccgtggcgcttggcgtggtggttaccgcgctggtacaggcggtacttggcggcgtcgggctggcgatttccggcgtgccttacgctaccctgttgacggtagtgatgatcctttcgtgtctggttcagttggggccgttgccggtattgattccagccattatctggctttactggacaggcgacaccacctggggcaccgtgctgctggtttggagcgccgtcgtcggcactctggataacgtgattcgcccggtactcatccgcatgggtgccgatttaccgctgcttctgatcctttccggggtaatcggcggcctgattgcattcggtatgattggtctgtttattggaccggtgcttctggccgtgacctggcgtttgttctccgcatgggtacatgaagttccggcgccgacgaatgaaccagaggagatccttgaagagctggatgacatcgaggaagccaacaagcagtcataatcccgtcgggcggcatcgccgcccgatgctttagcgacgtttatcaattcaacgcacaccccattttgattcgcccgtctgttccccgccgcatctcatttctgtcgcaaatccgttacagtttttaaactattgagacgaatctgatcgacgcaaaaagtgctcatgcctactattagcacacggttataaatcaacacattgatttataagcatggaaatcccctgagtgaaacaacgaattgctgtgtgtagtctttgcccgtctcctacgatgggctttttttttaacttttttcgctgcattgttacataagccagctcccgtttcccttcaacaccgcgatatctgcaacgaacaaataatattgcacaaaatagtgtgattctgttcaagtcgaaacggtgtcggtggtgctatttatagcatcacttttttcatataaaagcctaaaaaatgatgaacgcgttagaactacaagcactacggcgtatttttgatatgacgattgaagaatgcacaatctatatcacccaggataataattcgacaacctggcaacgatgggaagctggcgacacacccatctctccagaaatcattgccaggctgaaggaaatgaaagccaggagacagcgacgaattaacgccattgttgacaaaataaataaccgcatcggcaataatacaatgcgttacttccctgatttatcttcttttcagtccatttatacagagggtgattttatcgagtggaaaatttatcaatctgttgctgccgaacttttcgcacatgatctggagcggctgtgttagacgtaaactttatcgccgcatcgtattgataccggatagaaaaccacacaatcacgacattgacttgtcaccctatccaatatgcttcctgcctgtgtataccactgtaactttcaggcggcatctctgagtcagataatatgaaaaatcgttatttccctaccgctgtagggttgtattttaattactttgtacatggcatgggggttatcctgatgagcctgaacatgtcatcgcttgaacagcaatggcataccagtgccgcaggcgtatctattgtgatctcttcgcttggtattggccggctaagcgttttgttaatcgccggtatgctttccgatcgctttggtcgccgtccttttatcattctggggaccgcctgttacctgatttttttcattggcattctttatgctcagacgatttttgtcgcttatgcctgtggctttttagcgggtatggccaacagttttttggatgcaggtacctatcccagtttgatggaagccttccctcgctcccccagtacggcaaatattctgatcaaagcatttgtctctggcgggcaattcttgttgcccattattatcagtttattagtctgggctaatatgtggtttggctggtccttcctgcttgccggggcgatcatgcttattaatgctctgtttttattacgctgtccttttccaccctatcctggtcggatattgaagcccaaaatctcgcaagcgcctgtcgcaggcgtacatcattgctccctcatcgatcttatcagctacaccctttatggctatatctcgatggcaaccttttatcttatcagccagtggctggcgcagtatggacagttcgtcgcaggaatgtcgtatacccaatccatcaaactgttaagtatttatacctgcggatcgctactctgcgtttttataaccgccccgctggtcagaaaaacaattcgctctaccacattattgatgttttatacctttatctcttttattgcgcttctgacggtctgcctgcatcctcaggcctatgttgttatgatcttcgcattcgtcattggattctcttccgccggtggcgtagtacaaatcggcctgacgctgatggcggcccgttttccacaggagaaaggtaaagcgaccggcatttattacagcgccggcagtatcgcgacgttcactattccgttgatcacagcgcggatttcagaaatgagcattgcacatattatgtggtttgataccggtatcgccgcagtgggatttctcctcgcactgttcatcggttaccgaagtcgggctgaatcacaacatcacgctgaagcagcgtcaaccgcgcaataaatgttagcgtgccagttgcaatattattgccttgctatgcaaaataaaacgttagccattatcaccgggaaacaaaaaatgtaattttcgtgttaattattattcattatcttcacacttatcagaaaaattgcgatgagcatcacgagttatatgtattaaacaacaaattcgcagcaatttttatatttcatggctaacaaatgaaatgctatcaatgcaataaacctggcattttaaacgccatgttatgtacatataacgacagtaccgacttatagtgttactgaacaatcgctgcatgtagtaaagcagtaataagcaggacattgaatcaaaccatcagcaaggagctgtgaacaaatgtctcagaacaaggctcgcaacatgccatatttgctggctgttatctgcatttattttagttactttctccacggcatgagtgttattacactagcccagaacatgacctcccttgcacagaaattctccacggatagtgccggtatcgcctatttaatctctggcattggtcttggtcgtctggtcagtattttattctttggcgtactgtccgataaatttggccgtcgggcaataatactgcttggcgccgtactatatatgctatttttcttcggtattcccgccagtcctaacctgatgatcgctttcatattagcggtgtgtgtcggcgtggcgaactccgcgctggataccggcggataccctgcattaatggagtgttttcccaaagcatcgggctcggcagttattctggttaaagcgatggtctcttttgggcaaatgatttatccccttattgtcagcgccttgttagtcaaccatatctggtacggctacgcggtggtaatccccggtatccttttcgtcctcatcacgttgatgctgttgaaaagccgttttcccagccaacttgtcgatgccagtattgcgaaagaattaccccagatgaacagtactcccctcgtctggctggaaggcgtagcttccgttttatttggcgtcgccgcgttctcaaccttctatgtgattgtggtctggatgcctaaatatgcgatggccttcgccggaatggcggaatccgacgcgctgaaaaccatctcttattacagtatgggatcgttggtttgcgtgtttatttttgccgcattgctgaaaaaaatggttcgccctatctgggccaatgttttcaatgccgggctggcgacactcaccgctgcggcaatttacctgtatccctctccactgatctgtaatgctggcgccttcgtgattggtttttccgctgctggaggtattttacaattaggtgtatcggtaatgtcggaatttttccctaagagtaaagctaaagtcaccagtatatatatgatgatgaggggcgtagctaactttattattccactgatcaccggttatctctctactattggcctgcaatatatcattttgttagattttgcctttgcactactgacatttatcaccgccattattgtatttattcgctattatcgcgtatttaagatcccgcaaaacgatgtccgatttggcgagcgttatttccagtaaaaatgttaacgatgcgcaacaggcatgcgccctgctctgcactgtccacttattaaggagtataaaatggatgttaccgcaaaatatgaattaattggtcttatggcgtatcctatccgtcatagcttatcgcccgaaatgcaaaacaaagcgttagaaaaagcggggctaccgtatacctatatggctttcgaagtggataacacgacgtttgccagcgccattgaaggactgaaagcattaaaaatgcgcggtacgggcgtctccatgccaaacaaacagctcgcgtgtgagtatgtcgatgaattaacgccagcagcaaaactggttggcgctatcaacaccattgttaacgatgacggctatctacgcggctacaacacggatggtacgggccatattcgggcaattaaagaaagcggtttcgatattcggggaaaaaccatggtgctgctcggcgcgggaggcgcggctaccgccattggcgcccaggcagccattgaaggcattaaggaaattaaactgtttaaccgtaaagatgactttttcgaaaaagcggttgcctttgcgaagcgggtgaatgaaaacaccgattgcgtcgttaccgtcaccgatcttgccgatcagcacgcttttactgaagcgcttgccagcgcagatattctgacgaacggcaccaaagttggcatgaaaccattggagaacgaatccctgatcggcgatgtttccctgctccgccctgaattgctggtcaccgaatgtgtttataatccgcatatgacaaagttattgcagcaggcgcaacaagctggttgcaaaacaattgatggttacggcatgttgttatggcaaggagccgaacagtttgaactgtggacaggaaaagcatttccattggactatgtgaagcaggtgatgggattcacagcctgaccggtaaaattataattgcgacgaatgacaatgaagggtaccaaatgaaaaccgtaactgtaagagatctcgtggttggcgaaggcgcgccaaagatcattgtgtcgctaatgggaaaaaccattaccgatgtgaaatcggaagcactcgcctaccgtgaagcggatttcgatattctggagtggcgcgttgaccattttgccaacgtgacaacggcggaaagcgtacttgaggccgccggcgccatccgggagattattaccgataaacccttgctatttaccttccgcagcgcgaaagaaggcggcgaacaggcgctaactaccggacagtatatcgctctgaatcgtgcagcggttgacagcggtctggtcgatatgatcgatcttgagctttttaccggcgacgacgaggtgaaagccaccgtcggctatgctcatcaacacaatgttgcggtgatcatgtctaaccatgattttcataaaacgcccgcagcggaagagattgttcagcgtctgcgtaaaatgcaggaactgggcgccgatattccgaagatcgccgtcatgccacagactaaagccgatgtcctgaccttacttaccgccactgtagaaatgcaggagcgctatgcggatcgtccgattattaccatgtcgatgtcgaaaaccggggtaatatctcgtcttgccggcgaagtgttcggttctgcagcaacgtttggcgcggtgaaaaaagcatctgcgccgggacaaatatcggtagccgatctgcgtaccgtattaactatattgcaccaggcgtaatactttatcgtgtggcggaatattctctttctgccacaataaaataaatagttatctgatatgaatatgttccatattcattgaaagccgctgtctttattaccttaacacggttatatcgatattgctttcagggataatagtggagtaaatatgaaaatcaataagccatcacgcattaatggccgcgttcccgtgctctctgcacaagaagcagtaaattatattccagatgaggccactttatgtattctgggcgctggcggcggtattctcgaagcgacaacattaattaccgcactggcagataaatatcaaacaacccagtcaccacgagatttatctattattagccctaccggattaggtgaccgcgccgatcgcggcatcagcccgctggcgcaggagggattggtaaaatgggcgctatgcggacattgggggcaatctccccgtatttctgaactggctgaacaaaataaaatcgccgcctataactacccacaaggcgtattaacccagacgctgcgcgccagcgccgcacaccagccgggtattctgagcgatatcggtattggtacctttgtcgaccctcgccaacagggcggaaaattaaacgacgtgactaaagaagatctcattaagctggtagagatcgataataaagaatatctctattataaagcgatagcgcctaatgtggcttttatccgcgccaccacctgcgacagcgaaggctatgcatcatttgaagatgaggtgatgtatcttgatgcactggtgatcgcccaggccgttcacaataatggcggtattgtaatgatgcaggtgcagaaaatggtaaaaaaagccacgctgcatccaaaatccgtgcgtattcccggctatctggtggatattgtggttgtcgacgccgaccagacgcaactctatggcggcgcgccggtgaaccgatttatctccggggattttactcttgatgatagtacccagcttaccctgccccttaatcagcgcaagctggtagcccgacgcgcgctgtttgaaatgcgtaaaggcgcggtaggcaatgtgggcgtaggcattgccgacggcattggtctggtcgctcgcgaggaaggctgcgccgatgacttcgtgctgaccgtagaaactggcccggtgggcggtattacctctcagggtgtggccttcggcgccaatgtcaatacccgcgcgatcctcgatatgacctcacaatttgatttttatcacggcggtgggctcgatgtctgctatttaagttttgccgaagtggatcaacacggtaatgtcggtgtacataaattcaacggcaaaattatgggcaccggcgggtttatcgatattagcgcaacgtcgcaaaaaattattttctgcggaactctgacggccggaagtttaaaaactgaaattaccgatggcaaattaaatattctgcaggaaggtcgcgtgaaaaaattcgtcagcgaactgccggaaattacgttcagtggaaaaattgcgcttgagcgcgggttagacgtgcgttacatcactgaacgtgcggttttcactctcaaacaagatggcctgcatttaattgaaattgcgcctggcgtcgatctgcaacgggatattcttgacaagatggatttttcaccggttatctcaccagatttaaaactgatggacacaagattatttaccgatagcactatgggattcacgcttcctgacgcaacacattaaaaggagtacaaatatggatttttcattaactgaagaacaagaactattactggccagtattcgcgagttaatcaccagcaattttccggaagagtatttccgtacctgcgatcaaacgggcacctatcccaaagaatttatgcaggcgctggcggaaaacggtatttcgatgctgggcgtcccggaagaattcggcggcattccggctgactatgtaacgcaaatgctggcgctgatggaaatctcaaaatgcggcgctccggcctttttgattaccaacggccaatgcattcacagcatgcgccgttttggttccgcagaacaactgcgtaaaacagcagaaagtactctggccaccggcgatccagcatatgcgctagccttaacagaacctggcgcgggctctgataataatagcgccacaacaacctggacgcgtaaaaacggcaaggtttatcttaacggccaaaaaacatttatcaccggtgcaaaagaatatccttacatgctggttctggcgcgcgatacggagccaaaagatcctaaaaaagcgttcacgctttggtgggtggactcaaataaaccgggcataaagattaatccgctgcacaaaattggctggcacatgttgagtacatgcgaagtttatctcgataatgtcgaggtggacgaaagcgaccgggtcggtgaagaaggcatgggtttcctcaatgtcatgtacaattttgagatggagcgtttgattaatgcggcgcgcagtacaggtttcgccgaatgcgcatttgaagatgccgcccgttacgccaaccagcgtatcgcctttggtaaacccatcggccataaccagatgatccaggaaaagctggcgttaatggccatcaaaatcgaaaacatgcgcaatatggtgttgaaagtcgcctggcaggccgatcgggaagagtcactgcgtaccagcgccgcgctggctaagctgtattgcgcacgcacagcgatggaagtgattgacgatgcgattcagattatgggtgggcttggttatactgacgaagcccgtgtctcccgcttctggcgcgatgttcgctgcgaacgtatcggtggcggcacggatgaaattatgatctatgtggcaggacgccagattctgaaagactatcagaacaagtaaggatcgtaccggaacgtcttattcggcctgactgctttacggcatcaggccgaataaatcagatatatttcgccgtcaggtatttggcagcaaatacgcctgctcaaccagactatttttaaattgcttacgataatcgttgggagaacatcctacatgccgcataaacaatttggcaaaatggtccacattttcatatcctacccgccatgaaatttctgccagtggcgactcagtgtttgtcagcgcaaacttggcctcggtcatacgtcgttgaataacatagttgataggggatatatgatattctttggcaaattcatggcatatataactgacgctggcacgaaattttttcgatagctggtcaagcgtgattttttcacgataattattattgagataaacaagcacatccttaattaatacatcttttttaatgtagccttgttcagaacgataggcatttttaaaattttcatagtaaagtgcggtcagagtgtaagcaaatgcatcgtatacagaggaagccaatacgtttttcccctgcggaagtaacacgcttaattcattaaagatacttttaatgacctctttcccctgaaccacggaaaccaccggacaggaatgactctgcaatagttggttttcttcccaacctggaaaacaaaacccatacagcgcacaggtataggtggtagccggcgaattgctgtcggatgctacagcgtgtagccgcccccgctcaacgacgacaatatcgtccgcatgcgcgacgtagagtgaagagtcaataattaacctggctatcccttttttgacgtaaataagctctgtttcattatcatgcatatgatggccagactcccagtttggatcatcgctaatgacaaaacgtgaaaatcgaggggtcttgtcctgttcaaaaatcgtctccgcggcggagtcaaaacagcgctgatacataataacctctgtcaggtttaaaaagataaccaggataaaataaagcgagcgtcagtgttgtacaaccgtggagattaccagcaaaacaagattattcgttccgaatgcaagatattatgttcttttgcagacagctcagattacctgtcgatggcgtattatcagacaaaaatacatagccgacatatctttgatgttttcttttaacctcacagaaacaacatcgcacgtttcatgttaaaaaatgatgatatgcttcgcacttattattctcactaccgtatttatatttttatgacgcccttttcagatggttgctaacgattctctgttcgcagattttttgtgcaagattgttggcaaggaaaacagattgacccatcgtaaacctcttcagactgccgcagactattttcagtcagatttacgttacttatccgcacgcgactcactggagatgcaatgaaaataataacctgctttaagttggtgcctgaagaacaggacattaccgtgaccccggagcattcgctcaattttgatcgtgccgaggccaaaatcagccagtttgatttaaatgcaattgaggccgccgcgcagttagctggcggtggcgacgagatcgccgcgctcaccgtcggcggctctctgttacaaaattcaaaagtccgcaaagatgtgttatcccgcgggccggatgcgcttttcatggttcaggatgcgcaactggagcacgccctgcccaaagaaaccgcgctggcgctagcatccgcggcggagaaaattggctttgacctgctgctcttcggggagggctccggcgatatttatgcccaacaggtgggcctgctgactggcgaactcctgaaactccccgtcatcaacgcagtaagccatattcaacgcgacggcgacaaaatcatcgttgaacgcacactggaagaagacgttgaaattatcgagctcacgctgcccgcggtgctttgcgtgacctcagatattaacgttccacgcatcccgtcaatgaaagccattctcggcgccgggaaaaaagccgttacgtcgtggctggcgagcgatatccactggaccccaaccacgccactggcggaactggtcgccatctcggtaccgccgcagacagaacgcaagcatatcattctcgataacgattcgccggaagccattaccgcactggccgaccatttgaaaaaatccctgaactaaacccaacggagaaaaattatcatgaatcatttagctaacgtatgggtatttagcgataacgtagagcgttatgccgaattaatgaccggcgcgcggcagtggggagaaaaagtttacgccatcgtgcaaggaaacacggagatcgactacgtgaaagcgcttggcgctgatgagatagtcgttcttgaatcgcatacggatttgcagcgcgtggaaaactatgccgaaacgctggcctcattattaggcgaccaaaatgggctgctgctcatggcggcgaccaagcgctgtaaagcgctgggcgcccggctgagcatccagcttgacgccatgatggtgaacgacgcgacgtctattgacctcctcgacgggacgctacacgcagagcatcgcatgtacggcggacttgctttcggcaaagagaaattaaacagtccgcaggcgattattacgctggcacccggcgtgctggaacccgccgcccctctccccggtcatacttgcccgcagaccacgctggcatatattgccccacgccacgaggtattgtgccagcagcggcgcgcgaaatcgctaagcagcgtcgatttgagcaaagccaaacgggtcatcggcgtagggcgaggcctggcggcgcaaagcgatctggatatggtgcataaactggcggccgttctcggcgcagaagtgggctgttcccgccccattgcggaaggtgaaaactggatggaacgtgagcgttatattggcgtatccggcgttctgttgaaatccgatctctatctgacgctgggcatttccggccaaattcaacatatggtgggtggaaacggcgcaaaaattattgtcgcaattaacaaagataaaaacgcgcccattttcaattatgccgattatggcctggtgggcgatatctataaggttgttcctgccctcatcgaccagttaagccgctaattcctttttcaacgcacatctcccgtcgtcgatacggcgggaaaggagcataaagcatgtcggatgataaatttgacgctattgtggtgggcgcaggcgtagcaggaacggtcgccgcgtatgtgatggcaaaagcgggactggatgtactggttattgaacgcggaaacagcgcgggcagcaaaaatatgaccggtggccggctctacgctcacagtatcgaaagtattatgccgggattcgcaacgtccgcccccatcgaacgcgtcgttacccgtgaaaaaatctcctttttaaccgaagaaagcgccgtcacacttgattttcaccgcgcgccccctactccgccccttacgtcatataccgtactgcgcaacaaactggacccgtggttaatggcgcaggcggagcaggctggcgcgcagtttatcccaggtgtacgggtcgacgctctggtacgtgaaggcaatcgcgtcactggcgttcaggccggggatgatattcttgatgcgaatattgtgattctcgcggacggcgtgaattccatgctgggccgttcactggacatggtgcctgcctcgtctgcgcatcactatgccgtcggcgtaaaagagttgattgggctctctccggcacttattgaagagcgttttaatctggcgtcccatgaaggcgccgcctggttattcgctggcgcgccctccaacgggctcatgggcggcgggtttctttataccaaccgcgattcggtttctctggggctggtatgtggcctgggcgacattgctcacgcgaccaaaagcgtaccgcaaatgctggaagattttaaacagcatccggcgatacgccctttgattcaggggggaacgctgctcgaatactccgctcatatggtgcccgaaggcggcatagcaatgatgccggagctggcaaatgacggcgtgatgattgtcggcgacgccgccggtctttgcctgaatctcggctataccgtccgcggcatggatttagccatcgcgtccgcgcaagcggccgctcaaaccgccattgacgctaaagcgcggcaagatttttccgccgcgagtcttgccggttacaaacgcgcgctggagaaaaacggcgtgttacgcgatatgcggcatttccgcaaactccccggattaatggaaaacccacggctttttaccgagtacccgcgaatggcggcaaacattgtgggcgatctgttcaccgttgatggtggtccagtcccaccgttgcgtaaaactatcctgtcacatgcgaaaaaaattggactggtgaatctattaaaagacggcataaaaggggctacggcattatgagttcggacaataaggtgaatgttgacgtcaaattgggcgtaaataaattttacgtagatgaaggacacccacatatcattttgcgctcctcgcctgacatgcaggagtttaataaattaataaaagcctgccctgccggactctataagctggacgatgcgggaaatattcattttgactccgcgggctgcctggaatgcgggacctgcagggttctctgcggcaatactcttctcgaaaaatgggaatacccggcgggaacgttcggcgttgagtttcgctacggctgacgctctgaaacaccggataacgacgctacggcgtcttagagcctatcccagtaggcgttattggcgcagccagtttggacacggacagcgcgcaaaaaccggagcgtacacgtagtacgtgaggattttgagcactgcccaggtctaaaatggcaagtaaaatagccctaatgggataggctcttattcggcttgcccccggagattacgtcatttgtattaatagagaacaagtcaatgagtgttacattaacgtttgacgccgcaaggcggaaaacctatcgcgagtccggctactggggcgatgcttcactgggcgactactggcggcaaaccgcacgcgccgtacccgataaaatcgccgtggtcgataatcatggcgcgtcctggacctacgccgcgctcgactacgcggcaagccgcctggcaaactggttactgtctcaggggattcaaccgggcgatcgcgtggcctttcagcttccgggctggtgtgagtttaccctcatttatctggcctgcctgaaaacgggcgcggtatctgtcccgctacttcccgcctggcgagaagcagagctggtttgggtgctgaacaaatgtcaggctaaaatattcttcgcccccaccgtattcaaacagaatcgtccggtcgatcttatccttccgctacaaaatcaactgcgccatctgacgcatattgtcggcgtggataaactggcgcctgccaccacagcgcttgcgcttagtcaaatcatcgaccgcagcgaaccgttgcagtcagacattaacattcacggtgatgaactggcggcagtgctgtttacctccggcacagaaggaatgccgaaaggggtgatgttgacccacaataatattcttgccagtgaacgggcgtattgcgcgcggttgaatttaacctggcaagatgtgttcctgatgcctgcgccactgggccacgccaccggatttttacacggcgtcaccgcgccctttttaatcggggcgcgtagcgtattgctggacatctttaccccagaagcctgccttaccttattagcgcagcaacgctgtacctgtatgtcaggcgcgacgccgtttatttacgatctgctttgtgccgttgagcaacagcctgccgacctctcctcactgcgattcttcttatgcggcggcacgattattcccaaaaaggttgcccgcgactgccagcagcgcggtatcaaattattgagtatttacggttctacagaaagttctccacactcgatggttaatctgggtgattcgacttcacgcatgatgaataccgatggttatgccgccaccggtgtagaaattaaaatcgtggatgaagatcgcaatacgcttccagcaggccacgaaggcgaagaagcctcgcgcgggccgaacgtttttatgggatacctggacgagccggaacttaccgcccgcgcactggataacgagggctggtattacagcggcgacctctgccgcatggatgaagacggttatatcaaaattaccgggcgcaaaaaggatattattatacgtggaggtgaaaatatcagcagtcgcgaggtggaggatattttattgcaacacccccgcatacacgatgcttgcgtcgttgctatgcctgatgaacgcttaggcgaacgttcatgcgcgtatgtagtcttaaaaccgccgcacctttcgctgacgctggaagaggtgatcgcttttttcagtcgaaaacgggtagcgaagtataaatatccggaacggatcgtcatcgtagaaaaactgcccagaaccgcctctggcaaagtgcagaagtttctgttgcggcaggatattattgagcggctgcgccaggagcacactgcggtataaattgccggatggcgacgttaacgccgccatccggtattacactacttcttcagttccgccagactcagccaggtctgaaccacggtgtccgggttcagcgacaggctgtcgatcccctcttccatcagccaggcggcaaagtcttcatggtcggacggaccctgaccgcaaattccaacatatttgccctgttttttcgccgcgcggatcgccatcgacagcagcgctttcaccgcgtcgttacgctcgtcaaacagttcagacaccacgccggaatcgcgatccagccccaacgccagctgcgtcatgtcgttagaaccaatcgagaagccatcaaaatactcgaggaactgttcagccagcaaggcattggacgggatctcgcacatcatgatgatcttcagcccgttctcgccgcgtttaagcccctggcgcgccagctcttcgatgaccgctttcgcctggtcgaccgtccgcacgaacgggatcatgatttcgacgttggtaaggcccatatcgttgcgcacgcgtttcaccgcttcgcattccagcgcaaaacaatcgcggaaactttctgcgacgtaacggcccgcgccgcggaagcccagcatcgggttttcttcatgcggctcataacgttcgccgccgaccaggttggcgtattcgttggacttaaagtcagacaggcgaacgatgacgcgtttcgggtagaaggcggcgcctaacgtcgcgatcccttccgtcagtcgaccaacgtaaaattcacgcggcgagtcaaaccctttcatcatctcacgaatgtcgttttgcagcgcggcatcctggtcgtcaaactccagcagcgcgcgtgggtgaacgccaatcatacggttaatgatgaattccagtcgcgccagacctacgccttcattcggcaggcaggcaaagtcaaatgccctgtccgggttgccgacgttcatcatgaccttcagcggtagctctggcatggtatctacgctggagctttttacgctgaaatccagcatgtcggcatacacataaccggtatcaccttccgcacaggagacggttactttttcgccatctttcatgcgttcggtggcgtcgccgcagccgacaaccgccggaatgcccaattcgcgggcgataatcgccgcgtgacaggtgcgcccgccacggttagtgacaatcgccgccgcttttttcatgatcggttcccagtccgggtcggtcatatcggtgacaagcacatcgccaggctcaatacggttcatttcgccgatatcatgaataacttttaccgtacccgcgccgatacgatgaccaatggcgcgaccttcggcaatgattttcccctgcgcatgtagcgtataacgctccatcacctggccacgggagcgcacggtttccggacgtgcctgcacaataaagagcttaccggtatgaccgtctttcgcccattcgatatccatcggacgaccatagtgctgctcaatctgcaccgcttgtttcgccagttcctgcacttcttcgttggtgagcgagaaaatgtcgcgctgttgctgcggcacatcctcaatcttcacttgcttgccgtgctcctgggtggcggcgtaaaccatgcggatttttttcgaccccatggtgcggcgtacgatggccggacggcctgccgccagggttggcttatggacataaaattcatccgggttaaccgcgccctgcaccaccatttcacccagtccccatgccgaggtgataaagaccacctggtcaaagccggattcggtatcgatagagaacatcacccctgacgaggcgagatcggagcgaaccatccgctgcacgccagcggaaagcgctacgccgcgatgatcatatccctggtgaacgcgataagagatggcgcgatcgttaaacagagaagcaaatacgtgtttcactgccaccagcaccgcgtcgaagccctgaacgttaagaaacgtttcctgttgacccgcaaacgaagcatctggcatatcttccgccgtggcggaggaacgcacggcaaaagaggcattttcatcatccgacgaaagctgcgcataggcatcgcggatggcgttttccagcgccggctggaaaggagtgtcgataatccactggcggatctgcgcgcccgctttcgccagctgggagacatcatcaatatctgtcttatccagcagctcataaatgcgctggtttacgccgctttgatccaaaaactggttaaacgcatcggcagtggttgcaaaaccattcggaacggatacgcccatgccggaaaggttagtaatcatttcacccagggaggcatttttgcccccaactctgtctacatcattcatgccgagttggttataccaaagcaccagcggtgacgagccattgttggacatcgaacaatccttttgtgataaatgaacgagtttaagaaacacatagttgcgtatttatcctggcatacttaaacccgcgaaaaaaacggtgaatcgttcaagcaaatttattttttcattttttcagattgtttacgtagttgcgcaaacccgcgcatagcacggcattccctgaataacccccggtataaactgcgtttccaggaaatgaaacacacttttcattaattataaaaagcgcctgtcattttataaaataagcgacaagttatacgtttcccgttacttttaatttatgctttcagataattatgtttactcttcaggatgaacagaatggataatgttgttgatcgccatgttttctatatttctgatggtaccgccatcaccgccgaggtcctgggtcacgcggttatgtcgcagtttccggtgacgatcagcagcatcacgctgccattcgtggaaaacgaaagtcgcgcccgcgccgtcaaagaccaaattgacgccatttatcagcaaaccggcgttcgcccgctggtgttttactcgattgttttacctgaaattcgcgccatcatcttacagagcgaaggtttctgccaggatatcgtccaggcgctggtggcgccgcttcagcaggagatgaaactggatccgacgccgatcgctcatcgtactcatgggcttaatccgggtaacctgaacaagtatgacgcccgtattgccgctatcgattataccctggcgcatgatgatggcatttcattgcgcaacctcgatcaggctcaggtcattttacttggcgtttcgcgctgtggaaaaacgcccaccagcctctatctggcgatgcaattcggtattcgtgcggctaactaccctttcatcgccgatgatatggataatttgacgctgcccacatcgttaaaaccgctacaacataaactgttcggcctgacaattgaccctgaacgcctggcggcaattcgcgaagaacgccgtgaaaacagtcgctatgcctcgttgcgtcagtgccgcatggaagtggcggaggtcgaagcgctgtatcgtaagaatcagatcccctgcctgaacagcactaattattccgttgaagagatagccaccaagattctcgatattatggggcttaaccgcaggatgtactagcaaactagtttaatgggttggtttttgttatcatgccgttctgcctgcgaggtgtgacacgcctcgcacttgaaatcagcagggattggtttatcgtgatgcccatcacttcccggtagtcctgccgttgaagcaacaaatttctgagacttgtaatgaacagaaccgacgaactccgtactgcgcgtatcgacagcctggtaacaccgaccgaactcgcgcagcggtatcctgtatcgtcctccgtcgccagtcacgttaccgactcccgacgccggatagaaaagattttaaatggtgaagatccacggctactggtcgtcattggcccctgttcgattcacgatctgaatgctgccatggaatacgcgacgcagctccaggcacaacgccaaaagcatcaggcgcgtctggaaatcgtcatgcgcacctattttgaaaaaccgcgcaccgttgtgggatggaaaggcctgatttccgatcctgacttgaatggaagttaccgcgtcaattatgggcttgaactggcgcgtcgcttgctattgcaggtgaacgaactgggagtaccgaccgccacagaatttcttgatatggtcactggccagtttattgccgatctgatcagttggggagcgattggcgcgcgtaccaccgaaagccaaatccatcgggaaatggcttctgcgctctcttgtccggtcggctttaaaaatggtacggatggcaatactcgcattgccgttgacgctattcgcgcctcccgcgccagccatatgtttctctcgccggataaagacggacagatgaccatctaccagacgagtggcaacccgtatgggcacatcatcatgcgcggcggtaaaaaaccgaactaccacgctgaagatattgccgccgcctgcgatacgttgcatgaatttgatctgccggaacatctggtcgtcgacttcagccacggcaactgtcaaaaacagcatcgccgccagctggaggtatgtgatgatatttgccagcagattcgtaatggctccacggcaattgccgggattatggccgagagttttttacgggaaggcacgcaaaaaattatcagcggtcaaccattaatctatggtcagtccattaccgatccctgcctgaactgggaagatacggaagttttgttggaaaaacttgccgcagcggtagacagccgcttttaatagctcgcccatcctgccgggatgggcgtttcttcgatgcgttacccgcccttttctctccccgcgcgtatatcactccacagaattagcacttgctgttatcgcattaattattgataataataatcattgtgagtttgattattaataaataacatgtcgcgtatggataacaccgagctgcctcaccctaaggaaatagacaatgaaacgcttctccctgccgctgaacggcgcgtcaacagtcaggcgctattaggtccggacggcaaagtcatcatcgatcacaacggtcaggagtatctgttgcgcaaaactcaggctggtaagctactgttaaccaaataacgctccgccagcagacgatgctgctggcgtcaggctaacttgaacaactgacctccagccgctttccccactccggcggtcggctggcatagtcatcatctcgatcggtaaaaggttgacgtaaaacttcatgtaaccgatgcagttccgccatgtctccttgttcagccgcatctatcgcgcgttgcgccagccagttgcgcaacacaaccgcaggattcacgcgttgcatctgctgctggcgcagcgcgtcatccaccgcctctgtgcgcaatcgcgcccggtagcgatcgaaccaggcatcgaacgccgcgcgatcgataaacgtatcccgcaacggcgaggaagcgctctgttgctccgtatggcttaacatccgaaatgtacgggtatagtcactcccttcgcgcgccatcagactaaacaattcattcagtaaagcgttatcgtctttttgctcggtaaagaaacccagcttctggcgcattcgctgcccatagtgcgttaacaacgcgtcctggtaacgatccagcgctctgtttaacgcgtcgatctcaataaaaggggttaacgtctgcgccagacgttgtaaattccacagcgccaccaacggttgattatcgaagcggtaacgtccctgatgatcggaatggttaccaatgaagccgggatcgtagtcgtcgagaaaaccaaaggggccatagtcgatggtcagccccagaatcgacatgttatccgtattcataacgccgtgcgaaaaaccgacggtttgccactcggcgatgagtcttccggtacgcgccgccacctcttcaaaccacaaagcatatttttccgggacatcctgccattgcggccagtaatgacgaatagcgaaatcagccagttgctgaactttttccggctcacggcggtagtagaaatgttcgaaatgaccaaaacgcatatgactttgcgccagacgcattaacatcgcgcccgtttcctgcgtctctcgctgaaccggcgtatcgctggctacgatagataacgcgcgcgtagtgggaatacccagataatgcatggcttcgctggcaaggctttctcgtatggttgaacgcaggacggcgcgtccatcccccattcgcgaatagggtgttaatccggcgcctttcagatgccagtcgagggtcgagccatacgccaggagctgttcgcccagcaaaataccgcgtccgtcgccgagttgtcccgcccagacgccgaactgatgcccgctatatacctgcgcgacaggcgacataccgggtaataaggtttcgccgccccaaacgccagcgccattggtagcgtcaaataacgacgcgggaattgctaactgctgcgccagtttgtcgttataccaaatcagtcgcgcattttttaacggtgtgggtaaaagcgcggtatacgttgctggcagttcatcgcgccaacgggcagtaaaagacagggtcatagggcctcctgtcttcagtgtagacggttaatcaccggttaaacaccggcaaacagaaaggttatcgctgaacgagtttaatgagctggcttaccggcaccggaggccatagtccgccctggaatgcgctaaatcccaatggcgctgcgcgcgaaaacatcgcctcattatcaataccggcaatcatcagcgactcgcagctggaggagatctgggcaacaatagcgtgcatgaatggttcgaatgagatcatttcagctcgctgctgaataaaatttttatccaacatgactcgtttgaaaagcccatcgaaaatagctttagtcgacgcctcgcctgccccaaaatttgccagcattaatgggaaatgcattgccagattagctaacgtttcattgtttttgccctggtttaacccaggatagttctcatttatagctaattcaagaaacggaaagcgcgctgcccgggaaaaaagttcgctatctaataataataagtcactaattgcgggcggtaaattaagccatgcaataagtttatgctgaataaaaaagtgctgacaggtttctaacaacgccagtttttcaacaaacagacagtattgttcctccaccgaaagacgaggcgctaccaactcagtcggcatccgcacggcgccgtcttcagcggcaaacgttgcaataatctctaaaccaacaagccgagcattttcatccatgacgggaaggaaaaagagttcggaatggtaaagctcatcaagtgaagcaatcattacgccagtcccatggttagggcgctattcgccatccagtcactacggacggaaacagacgtaacttcagatactaattgaagcgtcatcatttttcttgtttaccggtgaaccggttcctttttttaacttactctgattataaaccaatatccaatgttgtacttttcacagggcgtgaacacgcccgtttttaataaaagtacgtttgtaaatgctacggttatatcattatatatgatgacaacagatgtcataagttcaaccggcgatatgttaaaaatagactataaaatttatatcgtctgcgaggttaaattcgccgtgcctgccagaagttttttcgccagtacacattatccagcgatgaacgcatcacgccacgactggtagaggcatgaataaactcattatttgtatcgtaaataccaacatgtaaaccactttcgcccgaaccggttttaaagaaaaccaaatctccgggcagcaattcatctttatcgattctggtgccgatttttgattgttcacgcgtatcacgaggcaactgcaaatcaaacttgtcgcgcatagtgaccaccacaaagccggaacagtccacgcctctgcgactcatgccgccgtaacggtatggcgtaccgcgccaggactgcaactgatcgttcagacccgcaatgacggtaatggagtctgataatctggcatttggcgccggtgcccgatgagtactgcatcctgccaggaacaatgctgtgataacaagaagccaaaaacgcatgccgcaacaatcctctgtttttattttggtattaatttagcgtcgaaattacctgcttttcaagaaacgattttacttaagtggccgaaatgagcgttggatgcccctcgacgtcgagtcgtcgaaagcgcagaccgtaggcttgcgccagataagagggggtgagcacctcttcccggcggccgcaggcaatgagtttaccgcgctttagtaaccaggctttatgcgcatggcgcagcgtgtggttcagatcgtggctactcatcacaatcgcaattcctgcctgacataaatgatgtaatacccgatccagagcgttttgttgcgcaacatcgagactgttcattggctcatcaagcagcaataattgaccgaccggattagcgtcgggatgaatttgtagtacaacggcagcaaggcgaacacgctgccactcgccaccggaaagctgattcacgcttcgccccagtttgtcgcctaatccaagcatatcggccacctcgttaagctgcccggttcgcgttttatcaggttgatgcaatgtcaggtaatgccagaccggcatggcgaacggcggattttgctgttgcgcaagataagcgcggtgttgggcaagcgttgccgtcgcccatgcctccagcggcgctccgccaaacctgatgctcccctcgccggaggttaaccccgccatacgcgccagtagcgtgcttttcccggcaccgttcggcccgacaagatgaaggatctctcctgcgcttacttcgccggaaagcggccccaggcgggtgctctcggcgacatcctttaattgcatcaattgagacattattttgccaacgtgatttttatgctttccatcacaataggatcttcaggcgtcatatccggcgaaaaacgctgtaccacctgaccatcccggcctaccaaaaatttttcaaaattccacagaatatcatccggatagagtggcgtacgccctttgcttaccatccgttcgtaaaagccgctcttctccggcgcgactgccgttggcgcagcggctatcagtttttgatacagcggatggcgcgcgtcgccattcacatcaattttactgaacatcgggaacgtgacgccccaggtgctggcacaataggttttaatctcctcttcgctgcctggctcctgccccataaactggttgcagggaaaacccaacacgacaaacccctgatctgcccacgccttctggatattttccaactgttcatattgcggcgtcaggccacatctggaggcgacgtttacaatgagcagcacttttccggcgtatttttcaagtgtagtgacctctccatcaatcgtcgtaacgtgagtattaagaagcgagttttgcatggtgtctccctgatgtcggtagaatagcgggtttcatcgttagcctttaatcatagactgcgaatgatgaaagcagttgtttaccgatgcgctaacgcgcggatttgagtagcagccagataaacactggtgcccccaatgtggcggtgaccaccccgataggcagttcagccgacgccagcgccagtcgggcgaccacatcagccaatagcagggcgatagccccggccagcgcgcagccgggaagtaaaacccggtgatcggttaaaccacataagcgcaggatgtgcggaataaccagaccgataaaaccaatcgcccccgccatcgccacgctgacgcccaccatccagccggtggcgatgaccaacaaattgcgccagaaccacagcggcaggccaagctgccgcgccgaggtttcccctagcgccagcatattcagcggttgcgactggcaacatatccagatcagtaccgggatgagcgcaatcattagccagctctgctgccagtcaacgccgccaaatcctcccatcatccagtacattaattgccgcagatcgaaagaggtggaaaaatagatagcccacgtcatcagcgcgctacagataatgcccagcgcgacgcccgccaacaacaagcggctggtagagagatggcgacgcgcaaaacgcagcaggattaacgtaataatgagcgcgccggctatagcgcacagtcccagcgcccatcctggcagttgcccctgccccagtaagacggcggcaataagcccaacaccggccccattcgaaacgccgagcagacccggttcagcaagtgggttttcaaacagcgcctgcatcacggcgccagatagcgccagcgcagcgccaaccagcaataccgcaagcgtgcggggaaggcgaatttgccagacaaacagttccccccgggcgcttaaccagtcaccgggggcaatccactgttcgcctgcgcataagctcagaagtgtagccagtagcaccagcagtgacaggctcagaagccagcgaacgtttcgtcgctgttgttggcgggcaaaagtcagcatgttatccattcagctgaaaagaggtagcgtgattttacggtgggtatcctttacttgaaagaaaaaaggccgcaatgcggcctttttagttatacgggtcatctttcaggctgacagatacgctgtcatcccgctgatctactttcgggatggcagcgtatctgccgcaatacaccctgatggatgttatgcctggatctgattactcttctttgggcgaagcgttttcgacccggctctttaacttctgcccgggtctgaaggtcaccacgcgccgtgctgtaataggaatatcttcacccgttttcgggttacgccccggacgttgatttttatcacgcagatcgaagttaccaaaaccagagagtttcacctgctcaccgttttccagagcacgacggatctcttcgaaaaacagttcaaccagttctttggcatcccgcttgctaagcccaagcttatcaaacagatattctgacatttcagcttttgtaagcgccataggttcaatccctcaatgatgcctggaatcgctcttttaatgcctctacacatttggcgacggtagcggcaatctcctcttcttcgagtgtacggttggtatcctgaaggatcaggctgatagcgaggctcttataaccctccgcaacacccttaccgcggtacacgtcaaataagtttacgccaactacctgatttacgccaactttcttacattcggataaaatatccgctgcgggaacgttttctgcaacaacaaccgcaatatcgcgacggttggccgggaagcgtgaaatctcccgcgcctgcggcacgatacggtctgcgagcttattccattccagttcaaacaccagcgtacgaccattcagatccagtttacgttccagttcagggtgaacaaccccaataaaaccaatacgttcatctttcagataaatcgccgcagactgtcccggatgcagagccggattcatctccgccttaaactggatatcacccagtttgccggttaaatccaatactgcttccagatcgcctttcaaatcatagaaatcaacggtctcttttgccaggttccagtgctcatcatagcggttaccgcaaatcacgccagccagcatcagatcctgtcgaatacccagattggcttgtgtatccggaacgaaacgtaaaccggtttcaaaaatacgcacgcgattctgctgacggttttggttatagaccaccgtcgccaacaatccgctccacagagacagacgcatcgccgacatctcaacggagatagggtttggcagcagcagcgcttctgcgcctggatggatgagctgttgtactttaggatcgacaaagctataggtaatcacttcctgatagcctttgtcgttcagcatggttttaacccgcttcaacgacagatcggcttcacggtgcgtccccatgattaaaccggcctgaattggctcgtccggaatattgttatagccgtaaacgcgggccacctcttccaccagatcttcttcaatctccatatcgaaacgccaggtcggcgctacggctttccactcgtcctgcccttcggtcacttcacagcccagacgacgcagaatatcactgacctgctcatccgcaatatgatgcccgatcaggcgatccagtttactgcgacgcagcgtaatggtggcgcgtttcggcaacgttgcttcgttgctcacatcaattatcggacccgcatcaccgccacagatatcaagaagcagacgagtagcgcgctctatcgctttatattgcagcgctgggtccaccccgcgctcgtagcggtgagacgcatcggtatgcagaccgtggcggcgagcgcgaccggtgatagacagcggattaaagtacgcacactccagcagcacattttgcgtttcgccgttcacgccggaatgttcgccgccaaaaataccggctatccccagcgccttatggtgatcggcgatcaccagcgtgtccgcatttaacgtcgcttcgctaccgtccagcaggacgacggtttcaccctcttttgccatccgcacgacaataccgccatcaatgcgatctttatcgaaagcatgcattggctgacccagttcgagcagcacatagttcgtgacgtcaaccaccgcatcgatggagcgaataccgcagcgacgcagtttctctttcatccacagcggcgtcggcgcgttaacattgatgccttttaccacccggccaagatagcgaggacacgcatcagcggcctctaccgtaatcggcagcgtatcgctgatggttgccgtaaccggcaccatttcaggctcctggagcggcgctttgttcagtaccgccacatcacgcgcaacgccgatgatacctaagcaatccgcacggttcggcgtgacgctaatttcgatggtattgtcgtcaagcttcaggtattcacggatatcggtacccagcggcgcatccgccggcagttcgataatgccgctgtgatcgtcggaaatccccagttcggagaaggagcacagcatcccttcagacggttcgccgcgcagttttgccgctttaattttgaaatcgcccggcagaatagcgccaatggtggccaccgctactttcaacccctgacgacagtttggcgcgccgcagacgatatccaacaggcgttctccgccgacgttgactttcgttacacgcaatttgtcagcgttcggatgctgggcgcactcaaccacttccccaaccacaacgccattgaagcttcccgcgaccggctcaacgccgtctacttccaggccagccatcgtaatctggttagccaacgcatcgctatcaattgccgggttaacccactcgcgtaaccacagttcgctgaatttcattgttttatcctgcctttatttaaactgtttgaggaaacgcagatcgttttcgaagaatgaacgcaggtcggtgacgccataacgcaacatggtcagacgttccatccccataccaaaagcgaagccagaatagatttccggatcgataccgacattgcgcagcacattcggatgcaccatcccgcagcccagcacttccagccatttgccgtttttccccatcacatccacttctgcagaaggttcggtaaacggaaaataagaaggacggaagcgaatctgcagatcctcctcaaagaaattacgcaggaagtcgtgcagcgtacctttgaggttggtgaagctgatgttggtatcaacaatcagaccttccatctgatggaacatcggagtatgcgtctggtcgtagtcattacggtatacacggcccggcgcaataatacggatcggcggttgctgcgctttcatcgtccggatctggacgccagacgtctgggtccgcagcagacgggtcgcgtcaaaccagaaggtatcatgatcggcgcgggccggatgatgacccggaatgtttaacgcatcgaagttatggtagtcatcttcgatttccgggccagtcgccacggtaaaaccaagctcaccgaagaaactttcaatacggtcaatggtacgcgtgaccggatgcagaccgccgttctcaatacggcgccccggcagggagatatcgatggtttcagcggccagacgggcgttaagcgctgcgctttccagctcggctttacgcgcgttaagcgcctgttgtacctgctctttcgcggcgttaatgactgccccggctgccggacgctcttccggcggcagatcgcgtagggtcgtcatctgaagggttaaatgccctttcttgcccaaatattcgacgcgtacattgtctaacgcggcaacatctgacgcctggttaatggcggccgctgcattggcaaccagctctgcgagatgtgacatggttttcctcattgtgtcggtgaagacaccggttcattggacgtaatctctcgatttcagatacaaaaaaagcctccatcaggaggcttttttgcgctgtttttcgtttcgtttttcacgcgctagcctcctgggatcaggtgctaaagtaaaaaaagaaacggaaaatagcagcgttcatgcttgcgttaccttatgtggtaaaaccgaatatcctttattgaaaagggttacaggtcaattgtcaactcactgaacagtaaataaaagagagggagccaggctccctcttttcactggcttatgccagagctgctttcgctttttcaaccagcgcggtgaacgcgactttgtcgaatacggcgatatcagccaggatcttacggtcgatttcaacagaggcttttttcaggccgttgatgaatttgctgtaagaaataccgttctgacgtgctgctgcgttgatacgcgcaatccacagttgacggaactgacgcttacgttgacgacggtcacggtaagcatactgaccagctttgataactgcctggaaggcaacgcggtatacgcgagaacgcgcaccgtagtagcctttggcttgtttcaaaattttcttgtgacgtgcgcgtgcaattacaccacgttttacgcgagccatatgtgctctcctgtatctattctaattaaaaagttaaaaacgttaacggcttatgcgtacggcaggcacgcgataaccaggcccagatcgcctttagaaaccatggctttcggacgcaggtgacgtttacgtttagtcgcttttttggtcagaatgtgacgcaggttagcgtgcttgtgcttaaaaccacctttaccggtttttttgaagcgcttagcagcaccgcgtacggtcttaatttttggcattttaataacttccacttcgcattgttaataaacgaaacataggcgaacaaaacctgtgaagcccgaaggcttcacagaattgttacttgaaggccttactgtttcttcttaggagcaagcaccatgatcatctgacggccttcgatcttcgttgggaaggattcgaccactgccagttcttgcaaatcgtctttcacgcgattaagcacttccataccgatttgctggtgggccatttcacgaccgcggaaacgcagcgtgattttggccttatcgccctcttcgagaaagcgaatcaggctgcggagttttacctgatagtcgccttcatctgtcccaggacggaatttaatttccttcacctggataactttttgctttttcttctgttccttagaagacttactcttttcatagaggaatttgccgtaatccattatacgacaaaccggcggctcggcgttagggctgatttcgactaagtctactccggcttcttcagctttttccagagcttctctcagactcacaataccaagctgctcgccttccagacctgttaagcgaacttcttgcgcgcgaatttcgctattaatacgattcggacgcgccgtttgaactcgttttccgcctttaatactttattcctccagttgttgaagactgcggctgcgaatctcttgttgcagcttctcaatcacgtcatttacgtccagactgcccaggtctttaccgcggcgggtgcgaacggcaactttgcctgcttccacctctttatcaccacagaccaacatataagggacacgacgtaaagtgtgctcgcggattttaaagccaatcttctcatttctcaagtctgcttttacacgaatgcccgcattttgtagtttctgcgtcaattcgttaacgtattcagactgcgaatcggtaatattcatcacgactacctgaacaggcgcgagccatgtcgggaagaaaccagcgaactcttcggtcaggataccgatgaagcgttccatcgacccaagaatcgcacggtgaatcattaccggcaccttgcgctcgttgtcttcgcctacataggaggcgctcagacgagacggtaaggagaagtccagctgtactgtaccgcactgccatgcacgatcgaggcagtcatataaggtaaattcaattttcggaccgtagaatgcgccttcacccagttgatactcaaacgggatattattttcttccagcgcaaccgccagatccgcctcagcacgatcccacatctcatcgctgccgatacgcttgtcaggacgagtggaaagcttgacgacgatcttctcgaagccaaaggtgctgtacatatcgtagaccatacgaatacaagcgttaacttcatcgcgaatctgctcttcggtgcagaagatatgcgcatcatcctgcgtaaagccgcgtacgcgcatcagaccatgcagcgcgcctgatggctcgttacggtggcagctaccgaattccgccatacgcagcggcaaatcacgataggatttcagaccctggttaaagatctgaacgtggcccgggcagttcatcggcttgatgcaatattcgcggttttctgaggatgtggtgaacatcgcatctttatagttgtcccagtgcccggttttttcccacagcacacggtccatcatgaacgggcctttaacttcttgatactggtactctttgagtttagaacgaacaaagacttccagctcgcggaagatagtccagccgtcgttatgccagaacaccatgcccggcgcttcttcctgcatatgatacaggtcgagctgcttaccaattttacggtggtcgcgttttgcggcctcttccaggcgctgcagataagcgttcagggcttttttatctgcccatgccgtaccgtaaatacgctgcagcatcttattattgctgtcaccgcgccagtatgcgccagcagttttcatcagtttaaagtgatggcagaaacgcatattcggcacgtgcggaccacgacacatgtcgacatattcttcatgatggtacaagcctggcttatcatcatgggcgatattttcatcaagaatagcgactttgtaagtctcgccgcgcttcacgaaggtttcgcgcgcgtcatgccagctcacctttttcttgataacgtcgtaatttttctcggcgagctcatgcatccgcttttcgagcgcttcgacatcttcctgagttagcgtgcggtcaagatcaacgtcatagtaaaaaccgttgtcgacaaccgggccgatcgccattttcgtgtgcggccaaagttgcttgattgcgtgacctaacagatgcgcgcaagagtgacgaatgatctccagaccctcttcatcttttgcggtgatgatggcaagcgtcgcatcattttcaatcagatcggaagcatcaaccagctcgccattcacacggcccgcaatggtggctttcgccaggccaggaccaatgtccagagcaacatccatcgggcttacagggtggtcataatggcgttggctgccatcaggaagagtaataacaggcatgtaatatccttatttgcagtggtgacccatacgcaagatcacatacaaagagaaaatgaatttattgacagtgagttgtgtatccatctagccaaccattgctaaattggcgcacaaccttcgacacagacgaaaatcgctattttcgtccggcatgacgatggtaacactaaaaaaagggagattgcatctttctgttctacagaacctgaatcccaacacactacccagcacgcgtatcgttaatgatgtacatggtcactctgagtctcgacttactgccaccgtatgagtcattcacatcagatagctttcgacgaccgctatctatattctccagatggggacctggcagcatgcgataacgcacaatacgaaacccactttccaaagcacataccagcaaagagccattacatgctgctatgaagcttctataactagcaacgtctcccttatgatgccgtacttgtaattcgtctgtgttgcttgaagtatgtcgcggcacgatgtgagatgagttactcgtcgagtgatagccctttctctgtatagtcttttacagggctcgggaacctcatgatgaaccttcgaataccactgtatataaacgcagtaacaatcatgcgtaattatcaaaagcatttacattgcttgatgtttgtgccgcaaacgcttgatagcttcatgctatcggaggcgcagtagataggagtgttaatgagtgttaatatgtcaataacacggttttgatatcgggaagatagtgatgagtaatgattatagactaccagattcagaatatcttgccagaagattttccgtaccacaccttgtttgcctgatggcaatattattaatatttttaatactaagcattttttctaaaggctctatatgcttataatttcatacattgtattatgcttattatttatagtttatctctatactctttccgtaagaattgagggaaaaataataaatgtaatggtcccatacctgataataacagtgcctacactgtacgtgtttgaaggtatatttgtatacctctcagaggtgcggaagtatacagtggaatatttgtttttctatacttgctatataacatacatagcatcatttgttatttcttatctttacacacaaagaaaacccatatacaacaaatcaaacacaaaaaataaaccaaggtatgtgtttacttcattgttattcaccttccttgcttttatcatttaccttccagtgttgatggagttcagagagtacatacttagcccaagaagaatatacgaattaaccagaacagggtatggtatatacttctatccttcattaatgttttctcttgtcgcttctatttgcgcgttctttacatacaaaaaatcaaagttattttgtatttccatagttttatttaactgtatacttattttcttgcatggtaacaaaggaccaatatttagtatatttatagcattcatcctttatctttcatatattgaaaataaaaaaattaaatttatgttcctggtgaaatcgtttgctgttatagcagtcattgtaacggcattctttgcatatacgtttactgatgggaatccgatagaaaatatggcgaattactcggattatacccgtaatgctgttcttgttgcttcctcaaactttgactttatgtacggaaaattactaatggagagcgaggtttactcgagaattccgagggctatttggcctgataagcctgaagattttggcgcattgtatctggcaaaagtatttttccctgatgcattctacaggaatcagggcgctcctgctttcgggtatggtgaactatacgcagatttcgggctttttacaccagtttggttagttatatctggagtatttaaaggcgtcctggctaagtatttctccaataaaactcaggaaacaaagtcagcgcattatttcataatgttcctattttgcattggaataagtgtgattcctgttagcatgggatggttgttccctgagcatttgatgattgcctttatagtatacattgcatcttcctttgttttttcagcgcatataagattcgttttactaagaagcgataaataatttatacggcggcaatgccgccgttttatttagttttggagcgtaaatcttgttgggtttgctgaacagcattaccaacgtaaattacttttgatgcattcatgatagtgcttgagtttcctaataatgatttatgaatagcccctcaattatatatttctcgccgccggttattattagtcctgccgctactctgccctaatccacatctactcatatgcggatcatcccgagattatcaccgtaatataatctaccattgatatcaataaacgctgtgttatgaatgacagttccctgcttaagttagattaggtacacacatcttacggcacgaaagggatcaatgtgaaacggtatgaaacatatatatgcgttattactagtaataacgcggaactggtgaaacaggtttaaacgaacgtgaatggatgtgaatgaaggatagtacttatacgcaagatcacatacaaagagaaaatgaatttattgacagtgagttgtgtatccatctagccaaccattgctaaattggcgcacaaccttcgacacagacgaaaatcgctattttcgtccggcatgacgatggtaacactaaaaaaagggagattgcatcactctgtagcaaatcaagacccttgacagggtttctccattatctttctacgcgccgtatagcgcttctcatcgacaacctaacttctgcaccagactcccctttgtcgttttcacctcgctggctaccgcttcaggcaaggcagaccacagcgtcagcactggcttcgttttatgttcgatagcctccacggtaacctgatagtcgcaaaaattcgccgaacggggcgtattctgatccataataaacgcagcgtaatttccttcactttttgacggcgccgttccggtgaataaaaccttccagtacccgctgggaatttctaccgtcgcatcttctggcaatgtggcgatatgccgctcaaaaagggggccggtcactacgtgcactacagatacatcagcctgtttggcaagttcgcgcacccggttttccagtgcagcccatgctccctggttcagggcggatttctgcggcgtaatattcgataaataatttaacgacggccagtccgaaacgccgcccaatcctgccaacggcgcctggtgtcccctgtcgacttttaatagcgtatgggcatttttataggccgaaggggccaacgtatccgagggcggtaaatcggggtcctgcgcccagttccgcgggcgaccgcttgcctggctggtctttgtcacgctataggcaacccagttggcaaatttcgtggcgctattattattgagcgtatagacatggcgatagattgtttgttgacttcctccttgaggacagccaacgctacagttatcaggttgctgaacgagtacgttacgatggggtaactcgggtgccgatattatatcctggggaggatacgatgtagtacatgcgcttaataatactacgggcagtaattttagcagattaatggttttattcactttttcttccttaataataactaccctaataattcagatggcaataatttgttatattaccctaccagccgttagatgcgctcatcattaaagacaacactatcacggtaaaaattaataacagataaacatcgaagacatcatagaaaatgagctcaaaagaatacaacgtgatattcatattgataccaaaaaacatcgtattatatgcataatcgtgaagccaataatttctcgcactcagatagcgaatgaaaaatggatattcaataatatctggcgcgtgttttttaacaccatttttcaacattaaggcaacgtatcctctcaatgactcgctgctggcaggagtttagttatatttaaagattcaataagcactgcgcatcatgcggctgtgcttattactttgtaaaaataagagtattcactttcatattcaggggtaaaaagtgaacaaatacagctattgcgcaacgatgattgccgccatactcagtacgaccacaatggccaatgccagtagccttgctatttcagtggcgaatgatgatgcaggtatatttcaaccatccttaaatgccctttatgggcacccggctgcagaccggggtgattatactgccgggctctttttaggctacagccacgatctcactgacgccagtcaactctcttttcatatcgcgcaagatatttattctccatcaggcgccaataagagaaagcctgaagccgtcaaaggcgaccgcgcgttcagcgcctttcttcataccggactggagtggaattcattagccaccaattggttacgttatcgtttaggtaccgatatcggcgttattggtcctgacgcaggcggtcaggaggttcagaatcgggcgcatcgaataataggcgcagaaaaataccctgcctggcaggatcaaattgaaaaccgttatggttacacggcaaaaggaatggtctcccttacgccagctattgatattctgggtgtcaatgtgggcttctatccagaagtctctgctgtcggcggcaatctcttccagtatttggggtacggcgcaaccgttgcgctgggaaatgataagaccttcaactctgataatgggtttgggttattgtcccgccgagggttaatacacactcaaaaagagggattgatctataaagtatttgctggcgttgagcgcagggaagttgataaaaactacacgttacaggggaaaacgctgcaaacaaaaatggaaacggtggatattaataaaaccgtggatgaatatcgcgtcggtgccaccatcggctattctcccgtcgcattttctctttctttaaacaaagtcacgtcggaatttcgcaccggagacgactattcttatatcaacggagacatcaccttcttcttctgaggcgtcaccacggaataaccgggttacgtaacgtaacccggtacaatattacatcttatagcccagcgttaccgtagtgcgacgatcggtatgttcaggcgctgattcaggcggctgcgagttccacgttaaattataccccacctttagaccaaaatgttcgttaatggcgacattgagggctgtttccgaatttagtgtggtgtcttctgcgccaaatactgacaccccctgtgtaaacttagcattgtcagttaactgccaggcatagctgccggaagcataacccaacggctgcgtttcagtggtatcgtccgtatgttcgtcatagcgaacccctggaccaaattcaaaacggaagctgtgcactggaccattaaggaactgccgcccgtaaccggcggtcagtacgtcgcgctgacgataaccgttgaaacggtctgtcagccaactggcctggccaaaggtataatcataatccgtcatattaaaacggttacgcgcgcctaccgcatatttttctgaagagcgttcatcattagaggaggtattgctggcattgccccataatgaccaggcagtacgttgtccataccaggtcatcgccgtgtcagccgttaaggaagaacttttagtattgcctgactgagcaaggtagcccgcattcagattaccttcaaaaggttttttcgcggtggagggatcatccatgacagtaaaaacggaatcatcggcggcggcatacagagacgcgaacacgccacccgccagcataactacagcgggtactgccttcaaaagcttcatttatatagagtccgtacaactaaaaaagagaccacgacggtcccggaaactttcatagggatcaatgacaaacgcccctggaaaggtagcgaattataagaagccccgaataacatagcaatcaattactatttcattttttgaataagaaccctcccgaagcattcatttatttatataactttacatcgtacttctttaaataaagatccggaaaatcatattgttaattccttcactttccggggattaagtgccagactgaaatcagcctaacaggaggtaacgatggtacgtatctatacgttgacgcttgcgccctctctcgatagcgcaacaatcacgccgcaaatttatcccgaaggtaaactgcggtgctccgcgccggtattcgaacccggcggcgggggtattaatgtcgctcgcgccattgcgcatcttggcggcaccgcgaccgcaattttcccggctggcggcgctaccggcgaacatctggtcgcactactggctgacgaaaatgtccccgtgtctaccgtcgatgcgaaagactggacgcgtcagaacctgcacgtccacgtcgagtccagcggcgaacagtatcgttttgttatgcccggcgccacgctggacgatgacgaatttcgccagctcgaagaacaggtactggaaattgaatccggggcaattctggttatcagcggcagccttccgcccggcgttaaggtcgagaaactcacgcaactgatttccgccgcacagaagcaaggcattcgctgcattattgatagctctggcgacgcgctcaccgccgcgctggcgcttggcgatatcgaactggtgaaacctaacctgaaagaattgagcgcgttggttaatcgcgatctgacgcagcctgatgatgtgcgtaaagcggcccaggaattagtgcaaagcggcaaggctcgccgggtagtggtctctctggggccgcaaggggcgctgggcatagacagtgagaattgcatccaggttgttcctcccccggtgaaaagtcaaagtactgtcggcgcaggcgacagtatggtgggcgcgatgacgttaaaactggcgcaagacgcgtcgctggaagagatggtgcgctttggtgtggcggcaggcagcgccgctacgctcaatcaaggtacgcgtctgtgttcccgtgacgatacccaaaaaatatacgcctatctttccgcgcaataatcgtatccccctcggcgagggggataccggaaaatcggtaacgggcggcgcatccgccgctgttaaaaacacagttgctcccaacgaggtgaacgatggccagtggcgatattacccgttatgttattaccgtaaccttccatgaagattccctgaccgagattaacgaactcaataatcatctgacgcgcagcggttttttgctgacattaacggacgatgaagggaatgtgcatgagctcggcaccaatacgtttggctttgttagcgctcagagcgctgatgaaatcaaagcgcttgtcgccggacttgcgaaaagcgcattagataaggatgtcgacattaccgtggcgacctgggaggcgtggagtaaaaacgcacaataagtgccattcccgccgcggcgcgtccgcgatgtgcgttagttcgtattttttaaccgcatttttgcgctaaccttatgatctggcagacaacgtggggagagacattatgtggcaagctatcagtcgtcttttaagcgagcaagtcggtgaaggcgaaatcgaactgcgtaatgaactgcctggcggagaagttcatgccgcatggcatttacgttattcaggccatgattttttcgtaaagtgcgatgaacgagaaatgcttcgcggttttaccgctgaagccgatcagctggagctgctctcccgcagtaaaaccgttgttgtgcctaaggtatgggcggtaggttcggatcgggattacagctttttagtcatggactacctctcgccccgcccgctggatgcccataatgcgtttattcttgggcaacagctggcgcgcctgcaccaatggagcgaccaacctcaattcggcctcgattttgacaacgcgctctctaccacgccgcagccgaatacctggcaacgccgttggtcgacttttttcgccgaacagcgcattggctggcaacttgaactcgccgcggaaaaaggcattacttttggtaatattgacgccattgttgaacatgttcagcaacgtctggcgtcgcatcaaccgcagccttctcttttgcatggcgatctatggtcggcgaactgcgcgcttggccctgacggcccctatatcttcgatccagcctgctattggggcgacagagaatgcgatctggcgatgctgccgctgcataccgatcagccaccgcagatttatgacggctatcagtccgtttcgccgctaccgctggattttctcgacaggcagccgatttaccagctctacaccctgcttaatcgggcaaggctgtttggcggtcagcacctggccactgcgcaaaaagcgatggatcggctgcttgcggtataggtacagcccatgccggatacgggctatccggcatttttcagtttacatgaagcctaacaaggaaaagaaaaagtagccgagcacgataataatgaccggcaaaatatagagcgggaaaaactgtaaaaagatggtatggtgcggcaccacgatacgtgactctatctgctcacgcgttagcccttccgcgccttttgctttttccaggatcaactgatcttccacgccttcacgcaaaaaacgtgactggcggctcattctggcgccggaatcctgcatcgccaacccgacaaaaatcagaataaaaatgagccagaaaccgatattcaggcttccctgaaaattcggcgtcggcgagttgtaccaaaaaacattcagaaacggcgtattcacgcgcatcatgtctatcattacgtgggtaaaatccagcaataccgcatttatcccctcctgcttttcactgtgcgcatacataaatttaaggactgagatgagcgtggaaagcagtgccggaataaaaataacccacccaacaactctttttaggattgcaatgcgtccagcttgttgatacgtcatgagttccccttgataaagacgcgtcgttttggcctaagtctacctgttgattcccgttttcgcctgatctttaagggcgatatactaagaacatggtcataatgaacgcttaattcgttattttttaatctcaacaggagaggttgtgatgtcaaccccacgtcaaattcttgctgcaattttcgatatggatggactactgatcgattccgaaccgctctgggatcgcgctgaactggacgtgatggcaagtttaggcgtagatattactcggcgccatgaactgccagacacgcttgggctacgcattgatatggttgtcgatctctggtttgcgcagcaaccgtggaacggccccgatcgccaggaagtgacaaaccgtgttattgcccgcgcgattacgcttatcgaagagacgcgccctcttttaccgggtgtgcgcgaggccgtggcgctgtgtaaagcgcaggggctattagtggggcttgcctcggcatcgccgctgcatatgctggaaaaagtgctcaccatgtttgaactgcgcgacagttttgacgcgctggcctctgcggaaaaattgccctacagcaaaccgcatccgcaggtctatctggattgtgcggccaaattaggtgttgatccattaacctgcgtggcgctggaggattcggtgaatggtctaatcgcggcaaaggcggcgcgaatgcgcgccattgtggtgccagcagaagaaaaccagcctgatccgcgctttgcgctggcgaatgtcaaacttaactcactgacagagctgacggcggcgcatctactcggttaagatgtttccgaaacaaagtcaacgggcaattagccgctgagccagacggcaagcggctttgacagagacaaagagttacaacgtcaccacttccgcctactgtataaaaaccctatactgtatgaattgacagtttaatgggttttatcatgacggcggaaggacatcttcttttttctatagccagcgcggttttcgccaagaatgccgagttaacgcccgtccttgcgcacggcgactggtggcatattattccttcggctattttgacctgtctgctgccggatatcgaccaccccaaatcttttcttggtcagcgcctgaaatgggtatcgaaaccgatcgcccgcgcgttcggtcaccgggggtttacccatagtctgctggcggtctttgccctactggcgaccttttatctcaaggtaccggatacgtggattatcccggcggatgcgctgcaaggcatggtacttggctatttaagccatatcgtcgcggatatgctcacccccgcaggcgttcccttactgtggccgtgccgctggcgtttccgcctgcctattctggcgccgcgcaaaggcaatcaactggagcgatttttatgcatggcgttgtttgcctgggcggtgtggatgccacagtccatgccggaaaacaacgtcatacgctggtcttcgcagatgattactatcctgcaaatgcagttcaatcgttttataaatcaccagattgattagtaaatcaacgccaaaatcatttttggtataaaccattccatttgaatataagagccagctcacagttctgctaatcttgcgcgaacagaatcgctaaaacacagcgcttcataataaaaaaatcaggagaacggggatgaattttccattaattgcgaacattgcggtgttcgtcattctgctgtttgtactggcgcaggcccgtcataaacagtggagtctggctaaaaaagtgcttgtcggccttgtgatgggcgtggtctttggtctggccctgcacaccatttatggcgctgacagtcaggtgttaaaagactccattcagtggttcaatattgtcggcaacggctatgtgcaattgctacaaatgattgtgatgccgctggtattcgcctctattttaagcgccgtggcacgactgcataacgcctctcaattggggaaaatcagttttctgactatcggcacgctgctgtttactacccttatcgcagcgctggtgggcgtgctggtcaccaatctgttcggactgacggcggaaggtctggttcagggcggcgcggaaaccgcgcgtctgaatgccattgagacgagctatgtcggcaaagtggccgatctcagcgtgccgcaactggtgctgtcttttgtaccgaaaaatccgtttgcggatctgactggcgcaaatcctacgtctattatcagcgtggtgattttcgccgcattcctgggcgtggccgcgcttaaactgctgaaagatgatgcgccaaaaggcgagcgtgtgcttgttgctatcgataccctgcaaagctgggtgatgaagctggtgcgtctggtaatgcaacttacgccttacggcgtactggcgctgatgacgaaagtggttgccggctctaatctgcaggacatcattaagcttggaagcttcgtggtagcgtcatatcttggtctggcgataatgtttgtggttcacggcatactattgggcgtgaacgggattagcccgctgaaatatttccgcaaggtgtggccggtgctgacatttgcctttaccagccgctccagcgccgcctccattccacttaatgtcgaagcgcaaacccgccgcctgggcgtgccggagtccatcgccagctttgctgcctcttttggcgcgaccatcggccaaaacggttgtgccggtctttatcctgcaatgttagcggtaatggttgcgccgacggtcggcatcaaccccttagaccccgtatggatagccacgctggtgggtatcgttaccgtaagttcggcgggtgttgccggcgttggcggcggcgcgaccttcgccgcgctgattgtgctgcctgccatgggcttaccggtcacgctggtcgcgctgttaatctccgtcgaaccgttgattgatatgggccgtaccgcactgaacgtgagcggctcaatgaccgcgggtacgctgaccagccagtggctgaagcagaccgataaaaccattctcgatagcgaagaagacgctgaactggcgcatcgataatacattatcgggagttcacatcgtctgagacacgacgatcggcaactcaaaatgtctgtcactaaaaacgccggtctccagtaccggcgttttgtttttttcttagtcagcgatttcgttttcctggcgaacctgattcgcccaacgttgcgccgattctggcacgctaaaggcgggcgaccgttgaaatgactcccccgtcagaacaaaggcaacatatttaccgcgcagtatccagacgtcgcgaaacgtatccatttttatcgcatgttccggcggcgcgggttcaacacgcggaatatagctaataatctggcgattttgctggcgaagaggtttcatcattaatgcttcactaaaagaggctaagagcctatcccattagggctattttacttgccattttggtcctgggcagtgctcaaaatcctcacgtactacgtgtacgctccggtttttgcgcgctgtccgtgtccaaactggctgcgccaataacgcctactgggataggctctaaggctaaaaatcagaaaaacactattttagccgatcttcgcccccgacgtcctgttccgcgcgtgcgatttccctattgagccttgtctgccgttccgctctcccccggcataattgctgaaatgttctatagttagagtgattttgactactaccacgcccatttcagtgatgaaagcaggagacgagttcaatgtcgcataatgagaaatccccccatcagtcccccgtgcatgatacccgtgaatcacagcccggcctggactccctggcgccgtcagacggttcacatcgcccaacgccagaaccgacgccgccgggcgcgcaaccaacggcccccggcagcttaaaagcgcccgagaccgcgaatgataagctcaccgccctcgacgcctttcgtaaaggcagcgaaaattatgcgctgaccaccaatcagggcgtgcgcatcgccgacgatcaaaattctcttcgcgccggcagccgtggccctacgctgttggaagattttatcctgcgcgaaaaaattacccactttgaccatgagcgtatcccggagaggatcgttcacgcccgcggatcagcagcgcacggctattttcagtcatataaagacctgagcgacatcacgaaagccgcgtttctgtgcgatccacagaaaattaccccggtctttgttcgcttttcgacagtacagggcggcgcggggtctgctgataccgtacgtgatatccgcggttttgcgaccaaattttataccgaagagggaattttcgatctcgtcggtaataacacgccgatcttttttatccaggatgcgcataagtttccggattttgtgcacgccgttaagcccgaaccacattgggccattccgcaaggacagagcgcgcacgacaccttctgggactatgtttccttacagcctgagacgctgcacaacgtcatgtgggcaatgtcggatcgcggcattccacgcagttatcggacgatggaagggttcggcattcacaccttccgtctgatcaatgcgcaagggaaagcgacctttgtccgtttccactggaaaccgttggcgggtaaagcctcgctggtatgggatgagtcacaaaaactgaccggtcgcgatccggattttcaccgccgggatctgtgggaggccatcgaagcgggcgatttcccggaatacgagctgggcctacaactcattgccgaagaggatgaatttaaattcgattttgatctgctcgatccgaccaaactgattccggaagagttggtgccagtacaacgcgtcggcaaaatggtgttaaaccgtaatccggataactttttcgctgaaaacgaacaggcggcatttcatccagggcatattgttcccggcattgattttaccaacgatccgctgttacaggggcgtctgttctcttataccgacacgcaaatcagtcgtctgggcgggccaaacttccacgaaattccgattaaccgccctacctgcccctaccataacttccagcgtgacggtatgcaccggatggatatcgacaccaatccggcgaactatgaaccgaactccattaatgacaactggccgcgcgaaacgccgccagcgccaaaacgcggcggcttcgaatcataccaggaacgcgtggatggcaataaaatacgcgaacgcagcccctctttcggtgaatattactcgcatcctcgcctgttctggctcagtcagacgccgatagaacagcagcatattattgacgcgttcagctttgaactgggtaaagtcgcccgcgcgtatattcgggagcgggtggtcgatcagttagcgcatattgatgtcacgctggctcagggcgtcgcgcataatctcggttttgcactcacccatgagcaaacgcaaattgccccgcctcctgatgtcaacggtctgaaaaaagatccggcgctcagcctgtatgcggtgccggacggcgatgttaaaggccgagtggtcgctattctgctgaacgacaaggttaacgccgccgaactgttgaccattttgcaggctttaaaagccaaaggcgtccacgcaaaactgctctattcacggatgggtgaagtaacggctgatgacggttcaacattaactattgcggcaacctttgccggcgcgccgtcgctaacggtcgatgcggtaatagtaccgtgcggcaatattgccgatatcgagagttgcggcgatgctcgttactaccttctggaagcctacaaacatctgaagcccatcgcactggcaggcgacgcccgacggtttaaggcgcttttaaacattgatagccagggggaagaaggacttgttgaggcagataacgttgaccaccactttatggacactctgctgacgctgatggcggcacaccgtgtctggtcgcgtgcggggaaaattaacgcgattcctgcataaacggcaaaaaatgcggcgcattcttgcgccgcaaactcaggagctaaatatcaagaaaacagccaggacgatatccacgttccgcaatcgctgccttgagtgacgcagacgtcaacacctccagttcagttaagcgggggtaacaataggcgctctggcgaataatgttatccacaaacgccggatgacacatcacctccagagaggcttctcctcgatgcgccgaggcatccagaatgcgtaaaaagcacgcttcggtgatctcctcgccgtaaaattcactactaaatccttgagtgctgcgcaaatccgacggcagatcgtcggcgttcaacaccgtctggcggtcaatacgtaacgcaatcccgcgctgcgccgcaaagtgggcgacgatggggaaaatttgcgggaacatatgcacatgatggtgactgtcgagatgcgttggctcgcggccaaatacgtcgatgaaacgctgatactgacacgccagttcatgcgcaatttcatccagcggaagcgtatcctcctccgccatttgccagatccatttccccaacaggccgtctcgcgtcaggcccggcatctctgacaccggtttgcctaacgtcaaaacaaaatgcattcccaccccaagcgcaggcagctcgcggctaagctgcgccgcatggtcaatagcctcgccattgaccagcgccgtcgtggaggtcacaacgccgttgcgatatgcttcaacaatgccgtaattttgccctttactcaggccaaaatcatcggcattcacaatcaacacgcgttccatagcctacctctgtcagtggtgcttacctttaagcgcttcgatgcaagcggcaaaattaggcagccatttttcatgcgccagaatgagctcacgcgccaggacttctgcgtcgcggtcggaatgcaccagcggactcaggttaagcgccagcagcacatcattaaagtttccgctcagcgccgcattgctggccgcgacctcaaatcctttaatagtgtggataagccccagcactttttcgtcaaaacgggtgatacgcgggtgcggcgtcgcgccattgcgtcccagaatgcaggtcatttccaccgcccagtccgccgggatattctcgacatgcccatgatgtggaatattaacgtaatgctcagtctgcttgtcattataaatagcgttaatgacttcacaagcggcatcggaataataagcgccgccgcgttgctcaagctctttcggcttcacgtttagctcaggatttttgtacaagtcgaagagttgtttctccactttttgtacgacctgagcgcgcgcgccgcctttgtaatattcgcccatttcaatcgccaacatctctttttgcttgaagtaatacaacaaataagagcacggcagcatgttcagcgagcgaatcaatccttcactaaacggcagatcaaagatattttttacggttgacgctttcaactgaccggacgccacgccatccagtaattctgcgaaccgtgaggtgccattcaccagcacatctttaataaagaccatatggtttagaccaaacaggtcaatggaaagatcgtcagtctcattcagcgccagcacgtcatgaataaacattttcatgccgacaggaatattacatacgccaatgaactttttaaagttggtatgacgataaaccgcttccgtcaccatccccgccgggttagtaaagttaatgacccacgcattcggacataattcttcaacatccttaatgatgtcaaaaataaccggaatggtacgcaaccctttaaataaaccgccagcgccgttggtttcttgccccagatagccgtggctaagcgggatacgctcgtccagttcacgggctttgagttgaccaacgcgtagctgggtagtgacaaaattagcgtctttcagcgcttcccggcgatccagcgttttatacaattttagcggaacgcctgctttatcaatcattcgctggcagagatcataaataatgcccagcttctctttcccgtcttcaacgtcaaccagccataattcggtaacaggtaattcatggtagcgcttaataaagccttcaagtaattcaggggtgtagctgctcccgccaccaatagtgacgacttttaatttctggctcataatatctcccttcagtgtatgacactgatatgtattacgctatgcccgctcgtaagaaatagcgtgacgttccccgcgctattggggcaagcgtgaaatgtaattaatcgagcaatgcaaaccgttactcattaatttccgtcaatcgcttccgataactattcggcgtaaatgaggtcatcttcttaaacgttttaataaacagacttggactgctatacccggcttcataagcaatatccgtaaccgaatagttggtcatttccaactgtttcttggcaaaattaatgcgaatctcattaatgatttgcatcggcgttttgctgtaataacgtcgggtggcgcgcgtcagatactcctgggattttgccgacaggcgcaccatattttccagcgcatgttcgccaaactgcgttttatcatgcattatctccacggttgctttcagccattgtggaatatcatcataaacctgctcttcgcggtaatggcgtaagcggtttataatataaaatgtcaccacttcgataaattcgtcgagcccattgccgcgaaaattcaacgacgcaatcaccgtttcaatataggtaaggaaggtgctattcgccctgtatacctgcgatgccacaaaacaaaacggcagtaacggaagataatgctgttcaaaaaaacgtttactaattcctacgttcagaatacgcgttgcgccaaactcatagaaactttggtgattcgaccccaccgggataaaaacaaaatctccacgttccagcagcacacgcttcccgttaatctcctggtaataacgtccggttaataccagggtaaattcatagtagtcgtgctgatgcagcccggtgacgctttccgtcttgttatagataaacacatggaaatttttgccattgaagagctgctgctcataaaccgttttgatttccgttgcgttaacctgtagctgcatcatccgccccctgttatttcagtttctcatggagctcaatcaactcggcgatcagttcacgagccagcattgaggtcatcaaatgatcctgagcgtgaaccaggaccagactgactttcattttgccttcgccctgatcgccttcgatgagttttgtctgcacaagatgcgcttcattgagcgctatgcgcgactggtccatcatcgctttcgccgcctcaaaatcgccttctttcgcttttctgagcgcgccatatgccaggctgcgcgcctgaccagaattgatgataagccccataacgacttcttcgagttcctcagccgctgtctggttatctacaacattttcaagatcaaacatagtctttcctctgattcagcccggcatggcatcccatgccggcgcggagtttagaatttcagtgcgttagcgatatcttcttcgctttcttcctgctcgatggcgttctgcgctttgttagccaccaccacgaaggggagataaatcagggtagcgaccgccaggttaaatagcgcaaccagcaacgcggcgacactgccgttggtgttaaagaacgcccccaacccggttggcatggtccacggcgcaatattggtaatcggcggaataatacccaaatagtaagccaccagcgtaatcgccgccagaatcggctgaaccagaatgaaggggataaacatcaccgggttcataataatcggcaggccaaacaggatgggttcgttaatctggaagatacctgacggcagcgccagttttgccacctggcgatagtccgcgcgacgggatgccaggaagatagcgatgatcagacccagcgttgcgccgctaccaccgaggaagatataagaatccagcatcggtttcgcccagatatggaacgttttaccggcttccagtgccgcatcgacggagccatactgctggtaaatagagatgttttccagcgcccagggcgtcatgatgccgctgtccagcgcggtcagcgccagcgaaccatgaataccaaagaaccacagcagcggtacaaaaatgacatatgcccaccctaccacgctacccagcgatgccagcggcgtagagatagtgtccataataatctgatggaagttagaaccgtaattagacagcgcccaggcaataatccccataatagagagaataataaagccgggaattaatgctgagaatgaacgagacaccgaagccggtacgctgtccggtagtttaatcacccagttgcgccggacaataaatgtaaacatctccgcgaccaccaggccaataataataccggagataatattcgcgccgcccagccagttagcgcctacggcataggcctcgccgacactatacggcgttacggtcataaatgccgccacggaaagcaatccggcggccagcgcatcaaccttgcgctcttccgccagcgccatgccgataaaaaatggcgccatgagcgacataatgcccaatgtgccgttatagacgttcccgccgatgcctttcaatccattaagtgtttcaatggttgaggcatcaagccgaatgcccatggaataaaaaaacgacccctccccaaagctcaggaaaacgttattaattaatacaaacatcgcccccgcaagggttaatggcattaaacgaataaagccgttcttgattgcattaacgtgtggctgctttcctatttttacagcaaaaggaaggagtaccttttcaagtgaagcaatgacgttactcatagaaaaatacccttaaataccgcaataaaatattgcggttagtgtatgaaataactctttgacgggaaaaattaaaaaataattaattcgcggcggcttttttaattgccgctaccgcagctttaagcacgcctaagccatctaccttgccgtacaacattgaatcaatgacttctaccggtttaccgggtaataaacgctgaatttcggggagcatataagcaatttgcgggcctaataacacgacgtccgctgccgggcctttttcaccggccagggtttcagggaatgcttcaataatcaccggcacttcatatttttcagcctgagcgcgcatttttgataccagtaacgatgttgacatgcccgcagaacaaaacagataaatgtgtttcttttccataaaaaccttcctcatgtgcgattatctgtcaaccagatacgccgcaagcctcaacctgcatccatactctgggcgacttgcgtaaccggatttacttttttaggtggctgaaatgagtatacgggatcggaccgccggatggtatttccttgacccactaaattgtctctcattgacctggcgttatgacccccctcacatttcgggcaaataattcgcgataataaataaggttatggcaggcacaaaaaaaccggctcgcaggccggtttccttgaatgttcaggcaatgtacagttgttactgcttcggcgcctgtgggtcagtgtcgtactccgcacaggtctggtagccggagttaatcacgtgcccggtatcatccagcgcaacaaagtaggtttccgctttaccatcacgttgacccaggatgtaggtctgacaggtaccgcgcgcatgaatcatactcacttcagatgacggtttgcccgcaatctgcgcaacttgcgccctgctcattccttttttaacatctttaacgacaggctcaacaaattggtcttttgtacgatcatacgccgtacagcctgccagcatagtcattaccgccgctgcgcttaaaattcctgctacgttcttgttcattttccgtcctcttgtttatcagcgtgttatgtaagcctggaatacatcagaatatttttcaagccgcgacccgccacaaaaagtctttcggaaaattctctaacgcagcgacatgttgttttaaacaccgcttagcccgccaaaccttgttgtttcagcggcgaagggttagctttaacagggtaaagattcatttttttaatgtcgaagggggttaaatgactctgcagcaagagataatccaggcgcttggcgcgaaaccgcatatcaaccctgaagaagaaattcgccgcagcgtggattttcttaaagcgtacctggaaacctatccctttttgaaatcgctggtgttaggcatcagcggcgggcaggattcgacgctggccgggaaactcagccagatggctatcgccgaattgcgagaagagaccggtgataatgcgctgcagtttatcgccgttcgtctgccttatggcgtacaggccgatgaacaggattgccaggacgccattgcttttattcagccggacagagtactcaccgtcaatattaaaggcgccgtcctcgccagcgaacaggcgctgcgcgaagcgggaattgagctgagcgattttgttcgcggcaatgaaaaagcgcgtgagcgaatgaaagcgcaatatagcatcgccggtatgactcacggcgtcgtggtgggcaccgaccatgcggcggaagcgataactgggttcttcaccaaatatggcgacggcggtaccgatattaacccgcttcatcgccttaacaaacgccagggcaaacagcttctcgcagcgctgggctgtcctgagcatctgtataaaaaagtccccaccgccgatttggaagacgaccgcccttcactgcctgatgaagccgcgctgggcgtaacgtatgacaatattgacgattacctggaaggcaaaacgctggaccccgccatcgctaaaactatcgaaggctggtatgtaaaaactgaacataagcgccgtttaccgattacggtattcgacgacttttggaaaaggtaagcgtacttctactgttgtgccggatatcgctcgtctatccggcctcctctcttcccagcctcttttttaatcacccatccgctgttatactggatgaataaccagttaacggagatcactgtggtacggcgtcaatcagccccccgccttgagtttgaagcggcggccatttacgaatatccagaacatttacgtcctttcctcagcgaagcgccagccttaccgggcgtctatgtatttcatagcgaaagcgatacgctgccgctttatatcggtaaaagcgtgaatattcgcagccgggtgctctcacatctgcgaacgcctgacgaggccgctatgctgcgacaggcgcggcggataagctggatctgcaccgctggggaaatgggcgcgttgctgctggaggcacggctgatcaaagaacaacagccgctgtttaacaagcggttacgtcgtaatcgccagctttgctcgctacagttgagcgaacaaaaaattgaggtcgtttccgcccgcagcgtcgatttttcccatgagccaaacctgtttggcctcttcgccaaccgtcgggcggcgctgcaaagcttacagaacctcgccgatgaacaaaaattgtgttatggcctgctggggcttgaaccggtaagccgtgggcgcgcctgttttcgtttcgctctgaagcgctgcgctggcgcgtgttgtgggcaagaaaccccgcaggcgcattttcttcgtctgcaggcctcgctggaacggttacgtgtggtttgctggccctggaaaggcgctatcgcgttaaaagagagccgtccacaaatgacccagttccacattatcaacaactggttatggctgggggcggtcccctcgctggatgaggccgccacgctggtgcgcacccctgcgggctttgatcaggacggctataagattctctgtaaaccgttaatgtcaggtcaatatgagatcattgaactgcacaccgactgtcgccagtcataaagaaaaccgccgatcctgtccacctcaacgattgtgttgtcgacaagaccggcggtcttaaattatgcggaaagttattctgccgcagcaggcattttaccttcttgcgccgggcgttctgtcagacgcttctcaaaattagcgttatattgctttttctgctccggcgtcagaacgttataaattttattctgggtttccatatgcgccagcatattggccttgcgctgcgcttccattttcgtaatttgcgcttcggctttggctttatcgaaggtatcgctggcaataatatcatgcatggcgcgacgctcttccagcagcggacgtttcatttgctcgcgctgcgcttttataatgtcgcgaatttgttgcttctgcgcgtctgtcaggttcaggtttttaaacatcatatcgtgatgtgggccaaatttacctttatgctgcatcattggcttcgcatccgctggcgcggcggtggtagtctcagcggcatgagccagattcgcagcccccatcgccagggtagaggcaacaaatagagcagtcagtttacgcatatttccatccttcctttcagttatttttacggcatatttaaaacagcgccgtgttgtcgtgattaactttaaccgtcttagcgtcaattagtcataacaacggtaaaacaatgaaagtataaaaaacactttttcgccaattgtgaagaaaaaaagaataaattgcgcagagttgaaagagaaatatacaacagcatgatatagcagaaattatgcagaactataacgcagcaacgcttattaataaagcaattctccaggaataatccgtaatagcatgaaactgtgtcccaaatcatccctgtaatcctaacgtgagcttacagggacatttatcagggcagtctttccagcattaatccagcccgcaatccgcaggcgacagagggattaggaaagagaacatattcaacgtcatgcgtcaccgtcacgcgcttatccccctcctcggccagcaacgttcccttcgcaaaggcagtaaaattcagcgtttgcgcatccatataaagcgcgaacttgtcgctgtgacgcgtgatttgcgacaccacccgatagcgtagcggcggcgaaaacgaggttgacgtttcgacaccgctcagcaacgccgacaacgcctgcgaggttacgttgaactgcgtcagatcgttttgcctaaacggcaacgcctttcccaactccagcgtacaggaaagcgcgccgaaatgttcagagctaaagtgcgtaaacgtaccgccgggcgcctgatgaaataccaacgcctctagtcctgccgcgcccagccacgccagaaaatctgtctcccacgggcggtcgcgctgcggcaatacgccaaaacgcaaatgatgcgagccacgaatggcggtatgcagatccagatgccagcgtacccgcgcctggccagatgaaaagaaggtatccagacttagctccagctcacgcgcccgccgcgtttcatcgctttcggcaaaggactgccaacgcccgccaaacatacggttcatatcgctgtgacaatagcgtattcccgccgccagcgcctgcggattgccgagtaccaccagcactcgccacgttaacgtcaagctgcctgaatacagcgccgacagcagcttatccagcatctcgaccggcgcggtttcattgccgtgtatccccgcagaaagaattaacgcgcggtcgaccggcgcatcgggcgtgagttcaagcagaccatggcttaaccagcgccagcgaaaacccgcgcccttcccctgcctcacccgtggtgtcgtgccgcttagcgtcaacgccagaaagttatccatcagccgcccccgtttgctggaaaggataaaccgaccccaaatccagcagacgcgttaacacatccagcgcctcccggccttctcgcaataataacggatcggccagatcggcggcggtcaggcgatcgcgataataacgatccgcccacgcgttaagggccgtaaacagagcgtcattcatcattaccgctggattcaccgcccgtcgttcttcttctgttaacaccacgcgtaatcgcagacaggccgggccgccgccgttggccatactttctcgcaaatcaaacacctgtatcgcgctgatggggttatcctccgccaccagcttattcagatagcgccagacgccggcatggtcctgacattcccgcggcaacactaacagcattgagccgtcgtcacggcttagcaactgactattaaacaggtaggtcgccacagcatctgatacagaaacctcttcggcgggcacctctatcgccataaaaccgtcaacgcgcgtacgcaactgattaatgagcactttctgccgggcaaacgccgcttcgtgacaaaacaatacctgtcgattcgaaacggcgatgacatcattatggaatacgccttgatcgatgacctccgggttctgctgagcgaagataacctgttgcggattcacctggttaagacgcgccacggcctcgctggcttcgcggctctggcgcgccggataacgagcgggtcgtatttcattctcctcttcgcgcccatagacaaaaagctgcacgcctgccgaaccatactcgccgccaagacggttatgattcgccgcgccttcatctcccaataatgcgacctgcggtaacgcgctatgcactgaaaactggttttcatcgcgaaatatggcgcgtagcagcgcttcggtcacaggcgcctcaagagcgcgatgaaatttattgtttaaattcgccaccgtcaggtggactttcccgtccagcgcgtctgccgatgggcaaaccgtcgccgcattcgcaacccacattggcgacgcggaactcacgctggaaagccagcgtggcgcctgacgcgcaaccttatccagaatctgctcatcgctacccgtgaagccgagctgacgcaacgccggaataaaaggccgctcatgcggcgggatcaccgcctggagaaagccggcatccgccagagctttcatctttagcagcccctgctttaccgccagacgaggattcgacacctgaaaacggtggcgggtcgatgcctcattgccgaaggatagcccggcataatggtgcgtaagccccaccagcccgtcaaaattaacttcatgcgccgtcataccgcctccctgcgagaaaagtcgaggccggggcttaatgtcgcaggcaacgtcagttcgggagattccagactggccatcggccaggcgcaataatcggcggcataccaggcgctgggccgatggttgccagacgcgccgataccaccaaacggcgcggtactcgctgccccggtgagcggtttattccagttaacgatccctgcccgcgcctccagcaagagctgttcgaactgcgcgcgatccgtcgacaccaacccacacgacagaccaaaacgggtattattcgccagacgaatcgcctcatcgaaatgcgcataacgccagacgttcagcagcggaccaaacacctcttcatccggcacatccgcgacgcccgtcagctcaatgatgccaggcgtcagcagagaggttccctctttgaccttccgcggcgccagtagcgtgcgaccgcctaatgcctctcgttgacgccaggcctccatcacatgctgtgccgcctgcgctgaaatcagtcccccgataaacggctgcggatcgtcgtcccatctgccgggctgcagacgtccggcgacgtcaaccagccgcgccagaaatgcatctccctgcgcaccctgttttaccagaaggcgtcgcgcgcaggtacagcgctgtccggcggtaataaacgccgattgcagcgtcagatgtaccgccgcatctgtatttgccacatcctcaataatgagcggattgtttccgcccatttcaagggccagtattttttccggctggccggatagctggcgatgaagctgatatccggtactggcgctgccggtaaacagcagtccgtcgagatcgtcgagcgaacttagcgcttgtccggtctcccggccgccctgcaccagattaagaacgcctgccggtagccccgcccgttcccagagttttattaccgtttccccggtccatggcgttagctcgctaggtttgaagatcagcgtattgcctgccagcaacgcgggcacaatatggccattcggtaaatggccgggaaagttataagggccgaataccgccagcacaccgtgaggacgatggcgcaacgtcgcggcgccatcgacaagttcgcttttttgttcgcctgttctggcatggtaagccttaatcgagatggcaatcttattgatcatcgccgtcacttccgttgccgcctcccagcgcggtttaccggtttcacgcgcgatgacctccgtgagctcggctttatgcgcctccagcagggcggcaaatttctctacgatagcctgtcgtgccgcaaaaggctgtctggcccaacgaggaaacgccgcgcgcgccacctggcaggcctcggcgacctgtgccgcattagcgtcattcccctgccaaagtatctccgcactcaccgggttcgttttgcggcggcgttcgccctgaccggttatccagtcgccgtttatccatagcgtcatacggttttctcctcagcgcaaaggcgtaccagccgaacgtggtcgcccgcgcgacatttcagcgcatccaactgcgcggcggtaagtacaagccgtgaagtctgcggatcggcacgcaccagcgcggcccgaaagtggtgatagttttcattggcgaccagacatgccggatagtcgccaggcgcgggttgcccttccgcgacttccaccagtcggcttttacgaatggcccgcacgcggtcaatatcacactccagcgtcggcccaccgtcgaagatgtcgatatagtggcgatagcgaaaaccttccttttccagcaccgcgcgggctggcgccgtttgcgggtggacttcgccaatcacggcctgtgcctcttcagataagaagtgggtataaataggatgtttgggcatcagctcggcgataaacgctttttgcccggtaccgcataaaaaatccgcccggctgaaatccatagaaaaaaagcgtttgccgagactttgccagaagggagaataaccgtgctcgtcaatgacgccgcgcatttccgccaccactttctcattgaatttatcgcgaaacgcggccataaacataaagcgcgattttgacaacaggtagccgttaccctctttacgccattcgggatcgagaaacagcgtgcaaagctcactgctgccggtatgatcattactcaggaataatgttggcaacgcgttatatacattcagctctttggaggcatgaaccagcgtaccgacacgatagttataccaggggtcgttaaggccgaccgcgacctcaatggcgcagatcccgccgacctcacccgtttcactatcctcgagaacgaatacatatccttgttcgccttttggcagctcgccggaccaggtttttagcgcgcgttcaatgcgggccgccagcgtcgcttcatttgccggtagcgaggttaagccgccgcccgttttgcctgcaagctgcatcagcgcggcgatatccgcatgttcgacaggacgaatcacccgcatgatgcgcctcccgtctgaaggcgttcgcacgccagggcaaaacgatcaagcccggtggctatctcctcgtcgctaacatttaacgctggcgcaaaacgcaccacgtcgccgccggcgatgagcaccatcacgcctgcttttgccgcttcctgggcgatgagtttggcttttccggcaaactccgtctgtagcacacaaccaagcagtagccccagaccgcgaatttcactgaacatgccaaaacgtgcattaatggtatttaggcgctcaataaacgcatcgtggcgctgtctgacgccgttttgcatctccggcgtattgatgatatccagtacttttccggcaactgccgtcgccagcggattaccgccgtaggtggtgccatgcgtgcctggcgtcataacgctggcatagtcttgcgtggtcagcatcgcgccgatcgggaagcccccacccaacgctttagcagtcgtcaggatatcgggcgtaacgccataatgcatatatgcatacagttcgccggtacgtccgacgcccgtctgcacctcatcaaaaatcagtaacgcctgatgccggtcgcacaattcacgcagcccctgcaaaaaagctttcgtggcggggatcacgccgccctcgccctgcacaggctctacgattacggcgcaggtattgtcatcaatgagcgcgctggcggagttcagatcgttataggctgcatgacgaatatccggcggcagcggcgcaaagtcctgtgaataggtgggttgaccgccagcgctgacggtaaagagcgtgcgaccatggaacgcgtttttaaaggctacaatgccgcttttatgattgccgacacgatcgtgggcatatttgcgcgccagttttaatgctgcttcatttgcttcagcgcctgaattacaaaagaaaacgcgttcggcgaaggtcgcgtcgatcagttttttcgccagtcgcagcgccggttcattggtgtaaccgttcccggtatgccagaagcgattcgcctgttcatttaacgcctcgcgcagcgccggatgcgcatgtcccaatgcgttgaccgcgatcccgccagcaaaatcaatgtactctttcccctgctgatcccacaggcgtgagccttctccgcgtacaggaataaaaggcgcgggaacatataccggcaccatccattcatcaaagttttcgcgcgtaactgacagagacatagcgacctcttttggtaaaaataaagttatttatatgttaattaatatgagtgtttgcgctgtaaatgtagattgcagcattcgtgccagccagcgttaacattgcataaacagaagtgataaacggtaaatcaatgggttacagcgtagcgatattcacttttactgcatgaaaagtgaatatttccgcataatcggtggctaaaaagaggaaaaagcgaaatattattcagttgccaaatataattctggaattgtgatcttatacgaaatttactggaaattaccgccccgttctggcgcatctgcacgcaaaccgtgccattttcgcgctatagaaaacaccatacgcttccattggccgaatctgacgatgagtggcagtcacccggtaaaatttctgttaccatcccaacacgattcaccttgcaaagtggcagtgactatgaaatttgtctcttttaatatcaacggcctgcgcgcccgtccccatcagcttgaagcgattgtcgaaaaacaccagcccgatgtgatcggtctacaggagacaaaagtccacgacgaaatgttcccgctcgaagaggtcgcgaagctgggctataacgttttctatcatggacaaaagggccattacggcgtcgcgctgctaacaaaagccacgcccatttccgtcagacgcggtttcccggatgatggcgaagaggcgcaacgccgcattatcatggcggaaatcccctcgccgctgggtaatatcaccgtcattaacggctatttcccgcagggggaaaaccgggatcatccgttgaagttccccgcgaaagcgcagttttaccagaacttgcaaaactatcttgaaacggaactcaagtgcgataatccggtattaattatgggcgacatgaatatcagcccgaccgatctggatattggcatcggcgaagagaaccgcaaacgctggctgcgtaccggtaaatgctccttcctgccggaggagcgtgaatggatgtcacggttactgaagtggggattagtggacacgttccgtcaggcgaatccgcaaacgatggataaattttcgtggtttgattaccgctcaaaaggtttcgtggataatcgcggactgcgcattgacctcttgctggcaagcgctccgctggcggaacgttgcgcagaaaccggtatagactacgacattcgcagtatggaaaaaccctccgaccatgcgccggtctgggcgacgtttcgtgtttgattccgctatctgattaaccgtaaggccgggatagcgcgacgcttcccggcaggaataacgaccttaacgacaatgataaaaaaactcgatgttgttgccgccatcattgaatgcgacggcaaaattctgctggcccagcgcccagctcatgcggatcaagccggtttatgggagtttgccggcggtaaagtcgaacccggcgaaacccagccgcaggcgcttatccgcgagctacgcgaagagttagggattgacgccacgcccggcgtctatatcgccagccatcaacgcgacgtgtctggccgacggattcatttgcacgcctggcatgtgcctgcgtttaacggtctgatacgtgcgctggaacatcaggcattagcctggtgtacgccggaagaggcgctggaataccccctcgccccggcggatattccgctattgcaggcgtttatggctttacgcgacgccagactaacggattcgtgctgatggttttttcgtcacgctggcactggagcacgacgccttccacttttattaccgcgccttcggagtaattctgatcctggtaaacgcagcactgaatgcagggctgggacgactgaccgcgcgtgctgaaaacttccggcgggacattcacctgaatatcaggacgactgttctggtttgccagcccgaccattggcattatcgccatcacggcgaccacgaggcttcggcacataggagttccttatttttctaagtatattctcagtataacggtaagccgccgtgaaaactttaatcctcttttgtcatcgcttttagttatgaccctcgccccgttatgaatttacttagcagcgtcatttttttcttgcttaccgtcacattgctgatggtatagtcgaaaactgcaaatacatattctgataaaacgcaaatacaaccacattaatatataagaggtttttatatctatggatcagacatgttctctggaatcgttcctcaaccatgtacaaaagcgcgacccgcatcaaaccgagttcgcgcaagccgtccgtgaagtcatgaccaccctgtggccgtttcttgaacaaaacccccgttaccgccacatgtctttactggaacgtttggttgaaccagagcgcgtaattcagtttcgcgtagtgtggctggacgacaaaaaccaggtgcaggtaaatcgcgcctggcgcgtgcagttcaactctgctatcggcccctataaaggcggtatgcgcttccatccttcggtaaacctttccatccttaagttcctcggctttgagcaaacctttaaaaatgccctcaccacgttgccgatgggcggcggtaaaggcggcagcgatttcgatccgaaagggaaaagcgaaggcgaagtgatgcgtttctgccaggcgctgatgactgaactgtatcgccatttagggccggataccgacgtgcctgccggggatatcggcgtgggcgggcgcgaagtgggctttatggcgggaatgatgcgcaagctttccaataacagcgcctgcgtcttcaccggcaaagggctttccttcggcggcagcctgattcgtccggaggcgacgggctatggcctggtctacttcaccgaagcgatgcttaaacgtcatggtctcggttttgaagggatgcgcgtcgccgtgtccggctccggcaacgtagcgcaatacgccattgagaaagcgatggcctttggcgcgcgcgtggttaccgcgtcggattcgagcgggacggtggtcgatgaaagtggcttcacgccagagaagctggcgcgtctgtgtgaaattaaagccagccgtgacggtcgcgtcgctgactacgcccgtgagtttggcttaacctatctggaaggccagcagccctggagcgtaccggtggatatcgccctgccatgcgcgacgcagaacgaactggacgttgacgccgcgcgcgtactgattgccaatggcgtgaaagccgtggcggaaggggcaaatatgccaaccacgattgaagcgaccgatctcttccttgaagcgggcgtactgtttgcgccgggtaaagccgccaacgcgggcggcgtggcgacatcagggctggaaatggcgcagaacgccgcgcggttgagctggaaagccgagaaagtggacgcccgtctgcatcacattatgctggatatccaccacgcctgtgtcgagtacggcggcgataataagcataccaactacgttcagggcgccaacatcgccggtttcgtgaaagtcgccgacgccatgctggcgcagggcgtcatttaatcccgtcgtcaggccagatagctttgcgcttattcggtctgacggcctgtctcctcagcaggcgggctttttttgcccgctcgcttacgcggcgcgctctttttcttttctccaccgcctggcgcgactatccctctgaaacgcttcaccggcgtgcgcttagcctgatcgatcagctgatataacgtgccgaccagcggttgcataaaatcctggtaacggcactgcttttcgctgatttgcgtcaaaacagattcccagtgcgcggtcatatctggacgggccgccatttccggcagcgaatgtattaacgctttgccagcatcggtagaatgaatgtagcgcccttttttggtcagaaagctacgtttgaacagcagctcgataatcccggcgcgcgtggcttccgtccccagcccatcggtcgcgcgcaggatctttttcagatctttatcctgcacgaagcgggcaattccggtcatcgcggaaagcaatgtcgcatcggtgaaatgacgcggcggctgggtttggcgctcgaccacttcccccttttcacacagcaactcatcacctttggcgacaaccggcagcggcgtaccgtcgttttcctcgtcgcgctctttactgcccagtaacgtccgccaaccggcctccgccagaaaacgcgctttggcgacaaattttcctttggcgatttccagttcaataacgcatttacgaaacaccgcgtccgggcagaactgcatcagatactgacgcgcaatcagggtgtacactttcgcttcgttttccgtcaaatggacagaagaactgcgcgccgtcgggataatcgcgtggtgcgcatccacttttttgtcatcccagcagcgattgcgcgtgtcaggattaaccacagactgcggcagtaaatccggggcgtggacgctaatcgcgttcatgaccgcctgccgtccggcaaagtgttcttccggcagataacggcagtcggaacgcggataggtaatcagtttgtgggtttcatatagcttctgacaaatatcaagcacgttttgcgcgctcaggccaaagcgtttggcggcttcaatctgtagcgtcgagagcgaaaacggcagcggcgcggattctgattcccgtttatcattataactggttaccagcgcgggctgaccgttgattcggttcactacatgctccgccagcggacgatgaagcaagcgcccctcttcatcctgataaggttcgcacgcctcgctcggctgccagatagcggtaaaacgctcgtcggcaggcgtaacgatgtgcgcctttacttcaaagaagtctttggcgacgaagttctcaatctcttcgtctcgccgcaccaccagccccagtacaggcgtctgcacgcgtcccacggataacacgccctgatagccggcattacggcccaggatcgtgtaagcacgggtcatattaatgccatacagccagtccgctcgcgctcgcgccagagcggagacgcacagcggcacgaagtcgctgttcgcccgcagcctgtcaatagcacgctcgaccgcctgcgggttaaggtcgtttatcagacaacgccgcacctgctggcgcttttcggcaggaagctggagataatccagcacttcatcaaccagaagctgtccttcgcgatccgggtcgccggcgtgaataatttcaccggcttgatgcaaaaagcgcttaatcacattgagctgtttggtgacggaaggacgaggctgaagctgccatttttccggcacgataggcaggtcagccagattccagcgcgcataacggctgtcatacgcatccggctgcgcctgttccagcaaatgaccaatacaccaggtgacgacctgcccgtttccgcactcaataaaaccatcgcctttacggtgcggttttggcagcacatccgcaatggcgcgccccagactcggtttttcggcaataaacaaccgcatcaggttaacgaatctcaaccatagcgcgaccgccgcgggcctcgaccagttcgccaatcgcggtcagatcgataccaaattccgccgcggtggctttaacatcgtcttcggcgtccggcgttaccgccaacagcagaccgcctgacgtttgcggatcgcacagcaggctacgaacttcacgcgacatgtcgcccatcagatgaccatagctggcgaagttgcgctctgtgccgcccggtacggcgcccagagcaatatactcttccacgcccggcagtttagggatgtcctgatagcaaagcagcgcctgcacgcctgcgccctggcacatctcgctcaggtgccccagcaggccaaaaccggtaacgtcagtcatggcttttacgccgtcgatattggcaaacgccgcgccagcaacgttcatccgacacatgacttccgtcgccagcccctgatgttcaggtttaagcagcgattttttctcggcggtggtcaacacgccaatccccaacggtttggtcagaaagagtttgcatcccgcctgcgcggtactgtttttcttcacccgttcggtcggcactacgcctgtgaccgcgagaccaaagatcggctccggggcgtcaatagagtgtccgcccgccagcgcgataccggcctgacggcaggcaaaacgccccccctcggtcacttcacgcgcaatatcgggcgacagggtattaatcggccagccaaggatcgcgatcgccataatcggtttgccgcccatcgcaaaaatatcgctgatggcgtttgttgccgcaatgcggccaaaatcaaacgggttgtcgactatcggcataaagaagtcggtggtgctgataatactggtgccattacccagatcgtaaaccgccgcatcatcgcgggtttcattacccaccagcaggttcgggtcgacgaacttcgcctgctcgctatgcaggatagtctccagcactttaggggaaattttacaaccgcaaccagcgccgtggctgtattgcgttaaacgaatggcttgctcgctcatggacatctcctgtcattgcattcgcgctatggtagcgctcattccctgatgtggtaagtatcactgtctgaattaccgcgcctttgctcagaatccagacagttttatccctcagcgtcagaaataacgcacaaacggcgtggggtcgggggtactgatcgtcgttgacgctttgagctgcggcgtgccgagatagagaaaaccaacaattttatcctgcgggcggcactcaaaggcttcccgcacgatagcgctctccgttaatgcgccgctacgccagataccattaaacccttgcgcaatcgccgccatttgcatcgccatcaccgcgcatccggcagacatctcctgttcccacacgggaaccttatggttttcttcgcatttcgccaccacggtaatgatcagcggcgcgcgaaacggcgaattacgcgctttttcgatcgctttctcatcgcctccggcagcgacagcgcctcgttcaagcacggcgctgaagcggtcgcgcccctctccttcaatcacaaaaaaacgccacggctgtagagatttatgatcgggaacacgcattcccgcccgcagaatgttctgtaattgctctccgacaggcgccggttctgcgagacgagaggcgctacgacggttgaccagcagttctagtgcatccatttgattaactccagcaatgatatttattcacaaaattaacacgggagcggattttgttacagcgcaggcagtgattcctgctgacaactgcctgatgggtcattacgatagccacatcttaatgctttatcctcaccaaggtataagcgttgttactcagatagggagaatacatgcgaaccctgtggcgatttattgccggattttttaaatggacgtggcgagtgttgaacttcgtccgtgaaatggtactcaacctgttctttatttttctggtcctggtgggcgttgggatctggatgcagatcggtaacggcagcaacagtgaacaaacggcgcgcggcgctctgctgctggatatttccggcgtcattgtggataaaccctccaccaatcatcgtctgggcgcgctgggtcgccagttatttggcgccagctccgaccgtctgcaggaaaactctctgtttgacatcgtcaacgctattcgtcaggcgaaagatgaccgtaacatcacgggtatcgttctggatctgaaaaacttcaccggtgccgatcagccgtcaatgcgctatatcggtaaagcgctgcgcgaattccgcgatagcggcaaaccggttttcgccgtgggtgaaaactacagccagggtcagtattacctcgccagtttcgccaataaaatttggctttccccacagggtcaggtagatcttcacggcttcgctacgaatggcctgtactacaaaacgctgctggataaactgaaagtctctacccacgttttccgggtcggcacctataaatccgccgtcgagccgtttatccgcgacgatatgtcgcccgccgcccgcgaggccgacagccgctggataggcgaactgtggcagaactacctgcataccgtttctgccaatcgccagatttcgccgcaacaactgttccccggcgcgcaggctattatcgacgggttaaccagcgtgggcggcgacaccgccaaatatgcgctcgaccataaactggtggacgccctcgcctccagcgcagatgttgaaaaagcgctgacgaagcagtttggctggagcaaaaccgaaaataactatcgcgcgatcagctattacgattattcgctgaaaacgcctgcggataccggcggtactattgcggttattttcgccaatggcgcgattatggatggcgaagaaacgccagggaatgtcggcggcgacactacggcatcgcagatccgcgacgcacgccttgatcctaaagtgaaagcgattgtgctgcgcgtcaatagcccaggcgggagcgtcaacgcctccgaagttatccgcgccgaactggcggcagcaagagcggctggcaaaccggtggtggtctcaatgggcggcatggcggcctccggcggttactggatctctacgccggcaaactatatcgtggccagccccagcacgctgacgggttcaattggcatcttcggcgtcatcaatacggtagaaaacagcctgtcgtcgattggcgtacacagcgacggcgtttccacctcgccgctggcggatatttcgatgaccaaagcactgtcaccggaagtgcagcagatgatgcaactcagtattgagtacggctacaaacgctttatcacgctggtggcagacgcgcgtaagcgtacgccggagcaaattgataaaatcgcacaaggccatgtctggaccggagaagacgcgaaagccaatggtctggtggacagtctcggcgactttgacgacgccgtcgccaaagcggcggagctggcgaaactgaaacagtggcatcttgattactatcaggacgaaccgacggtccttgatatggtcatggacagtatgaccggatcagtacgcgccatgctgccggaggccattcaggctatgctcccggcgccgctcgtttccgccgccaacacggtgaaggccgagggggataaactggcggcatttaacgatccccaaaaccgttatgcgttctgtttgacttgcgcgaacgttcgctaatgcttcatcaatagccataccggatggcggcgtctgctcatagccgccatccgataatcattaatacgtccttcgcgacacgactgaacattatcatgcaaaagaaatcaatttacgttgcctataccggcggtactatcggtatgcagcgctcagataaagggtatatcccggtgtccgggcaccttcagcgccagctggcgctgatgccggaattccaccgcccggagatgccggattttaccatccatgaatatgccccgctgatggattcatcagatatgacgccggaagactggcagcatatcgctgcagatatcaaagcgcactacgatgagtatgacggttttgttattctgcacggcaccgacacgatggcgtataccgcatcggcgctctctttcatgctggaaaatctgggtaaaccggttattgtgacagggtcacaaattccgctggctgagctgcgctccgacgggcaaattaatttgctgaatgcgctttatgtcgccgccaactaccctgttaatgaagtaacgctgttttttaataatcgtctgttccgcggcaatcgcacgaccaaagcacatgcggatggttttgacgcttttgcctctcctaatctgccgcccttgctggaagcaggaattcacattcgccgtttaaatacgcctcccgcgccctacggttctggtgaattaatcgttcaccctattacgccgcagccgataggcgtagtgacgatttatccggggatttccgccgaggtagtacgtaactttctgcgtcagccggtaaaagcgctgattctgcgctcttatggcgtaggcaacgcgccgcaaaataaagcgtttttacaggagctgaaagaggccagttcgcgcggcatcgtggtggttaacctgacgcaatgcatgtcagggagagtcaatatgggcgggtacgctaccggtaatgcgctggcgcacgctggcgtgattggcggtgccgatatgaccgtcgaagctaccttaaccaaactgcattatttgttaagccagggtctggacactcaggcgattcgtagcgcgatggcgcaaaacttgcgtggtgaattgacgccggatgattaaaaaatcccgacgacaaggagaagataatgacaaaccgggccttattactggtcgacttgcaaaatgacttttgcgccggcggcgcgctggctgtagcggaaggcgacagtaccatcgacatcgccaacgctcttattgactggtgccagccccggcagattccggtgctggccagccaggactggcatcccgcgcagcatggcagcttcgccagccagcatcaggcggaaccctatagtcagggagagctggacgggctgccgcaaacgctctggccggatcactgcgttcaacataccgacggcgcggcgttacatcccctgcttaaccaacatgcgattgacgcctgcatctataagggtgagaacccgctgattgatagctacagcgcgttttttgacaacgaacatcggcagaaaactacccttgatacctggcttcgcgagcatgacgttaccgagcttatcgtgatggggttggcgaccgattactgcgtaaaatttacggtgctggatgcgctagagttgggctatgccgttaacgttatcaccgatggctgtcgcggcgtgaatattcacccgcaggatagcgcacacgcgtttatggagatggcgtcggcaggcgcgacgctgtatacgctggcagactgggaagagacgcagggccaggctgtcgccaggtagcggagcaggtatcgtatccggtcaatacatcacgcaacggtgagaccattgcatagatctttgggccggatacgtcacgtcagcgccgctaccaggcaaagctcaacgcaggctggagagcgcttctaacgaaactcttctcgtttcaatgccaaaacaaaataatatcagcgcgcacgccgccagcagcatacccagcacaacaaaaacggtgacagatccataccgggtcagtaaaaccgccacgccgtagggggtaaagacagcgacgatccgccctaccgcattcacaaaacccgatccacgtagtctaaggtgcgtaggccataattcgggaacgtaaaccgccgaggcgaagcagacgtacatatacagaaaggaaatcatgactagtccataaaccagaatggcccattcctcagtctgtattgagtaaaaatatcctactaccgcaataacgataagcaacagcgaaccaaataaccgtctggggaaatgatcaataatgagcgcggcgataaatatgcccaccggcgcgccaatcataatgatggcggtcatgaaaatggattttgtaacatcaattcctgaattaacaaaaattgtcgggatccataccgtaatggtataaagcgaaatgttcatcgcaatcaatacagtgatcgccactaacgtgcgccgcaacatttgtcctttgaataagagccagaatgtaccgttttcaaagcgcgattccgtggatttattgctttcctgatgcggcggcaaaacaatacttttttctttttctatttgcgattcaatcatgagaagctgctgttcagcctcgcgttgccgccctttacctgctaaccacctgggcgattcgataaagtacttccccgaaagagaccacgccagcagcatccctatcccaccaagaagaaacatcatccgccagcttaaaaacgcaatgaccactacgccaattcccgcagacagcatcggtgaccagttccctacaaaagagagacgcgcggaccattttcctcgtacaatgggagggataaactcggtaaaagaagcatatccaaccataatcaatgcccccatgcctgtccccatcagacaacgaaagaaaatcagccagtacatattgggaacaaatgcggcagccgttgcggagatgcccacaagcaacaaattaatgcgaaacgcttttcgacgccccaggtaatccccaataaaaccgccggtaagcgaaccaataaaatagccaagcatcagtgccgatgtgaacgcggcattaagataattattcgaccagccattgtttatcaatttggccagaaccacatttcctgaataactcaaaaaccccgttaatagcaggccaaaactaattattccaaaaatacgaaaatgaaaccgggataacggtaagcggtctagtctggcgccgatatgatcattgtcttccatctggatggcctctaacgcagcaaaataataaattattgtctctcggcaaaggggtatttgccgcacttgctatcatctgccgttttttttggcataatccaggcgaaaacaatccaggcaaggataatctatcgattaatagacaagctggatattatttttatcgcaaaatgcgatccattcatcacctggcgttttattcgttatcaggtaatggatatgactaaaatcgaccaaccgcacgaacgctttacgatcaaattttgagtggtccaccaataacgccacctctgtggcctggcgaatcatcgtttttttgatttcagcttccgcctcgttagaatcaagcgccccgctcgccatatccagccctttacaactcattaccataatatcaacatgataacggctgattatttctttagtgatacgcccctgcagcgatagcgtatttttatttaactcaccgcccgtagaaacaagattaatgtccgattgcgccagttcatggaaagcttccgctgagttagttaacaaagtaagatcgtttcggtctttcaggagttttagcaattccattaccgtactgctggagtcggcggccatcgttgttttgtttttaataaacggaagcgtattacgggctataatttgcttctcttcatagaacgattttgcacgcttataaaaatggatattgtcagccagcaccgccgaatttaataccgcaccgccataagttcgagtcaaaaagccttcatcttcgagtttttccagatcgcgtcgaattgtctcttcggttacctgaaaaattgaactcaagttagagactgttacttttttatcattagcgaccatttgtttgatcgcctgaatcctgtctttcgccgccacgattacacctctgttttcgacgtcatgataaacgttgagtatctcacagactatgtttactttcaaaataagccgtttgaataacagattttatctgcatttcgccaaaaaagaggtgtaatgtattgcttatggattgtccagcgcttccgccatttgtctcatcaataacgcatcgtcatccgttaaggtgatggacagcgcagcgatattctctcgtacctgctccggcgacgtggcgccgctcagtatcgaaatcagctcgctttgtcgcaatatccacgccagcgccagcgtcgggacggcgcaatggtatttgtcgcacaatggctgccactgctccagcatatcaataacccgcaacatattctcacgctggaaccagagtttattcgcgcgcgccccgccgggaacatagtcacgggtaatggtgccggttaacaatccctgctccagtggcgaataaacctgtaccacgatgccgtgctcgcggcatagcggcagcagctccgtttccagcgcccggtcaagaatgctgtatttcgcctgtatgatgtccagctcgccatgtttaaggtattcgcggatatggctgacatctacattcgccgccccgatagaacggattttcccctctgctttcagagcattgagcacgccaacggtttccgcaatcggcgtaaaaaacggcggtaccgactgccagtgggtcatatagatatcgatataatcaatccctagtcgctggagactggcatcgacttctttacgaatagagtccggagaaagatttttatagagctggcgatcgccgactttattgaacagactcccttcccgctcccagacgatcccgcatttggtctccaccaccatctcgttacgcggtaattttttcagcgcctggccgacaatcacttcgctattgccaaagttatagcccggcgccgtatcaatcaggttaataccacaacggtgcgcctcaacgatagtatcgatgcagacctgcatatcgaggttgccattccatgccggaccgccgccgatagcccaggtgccgagtcccatacgggaaagcgctatatctgtattacctaaaggtatcattttcatctgccgctattacccttcgtattcattcaggagttgttccactagcattctgtttttcacgcccgttgtggcgcccacgctgagtaccgatatcgcggccgtcgcattggcgaaccgtgcgcattcacgcagcgtttttccctccagtagcgcggcgataaatcccgatgcaaaattatcaccagcgccaatagtgtcgatggcggtaatgcctgacaccgcaggcacctccatttttatatcggcgcttttgataaagcagcctttcttgccagttttaatcaccactgtttttacgccacattgcaaaaaacaatcggcaatatcatccagcgtctctttcccggtcagctttttggcttcatcaatattaggaaacagataatcgacaaaacttagcgcttcgcgaatatcgtccagagtttcattcagccgcggtttgatcatgtcagcgcagataaccagttgatgcgctttcgcctgcgtaaaaatagccgttaatgctttgccatccagcagcgggctgttaaagatacttgccagtgataacagcctgacctgagaaaaacggtcaaaatcgacatcgttaatatttagcttccacaggctgccgttacggttagtgacaaaggtgcgctcaccatcatcagtcaccagcccaacattaattgaggtatcaatatccgcatcctgcttcaggctctgaatatcgatattctccttccgacagtggtcgagaataaaatatcctgccgcatcgtcgccaacgcgactcattagcgcagtgcgatgcccgagacgcgaaataatcgtggcttcattaatcgcatctccccctgtggtcatggcaattcgttctaatggatacgaatcgacatcaaagatatttttactaaccggttgcaaaggaatgtcgacaatggccgcccctatgcaaagaacttcaatttcgtccatatcatcattccgctttaccatctgaaccaaacagtttgattttttccagcgcacgggcttttaccgctttgcgtacttcgcgttccagatgcaggaacggctgatcctgattctcttttaccgctaccatcgcggcctgacacagttcggtgtggatattgattttcgagatgcccagcgaaatggcttttttgatatccgcgtcgctaataccggaagcgccgtgtaacactagcggtacggaaactgcctggcgcacgcgctccacgacctcaaaattcagttttggtttagaggtatacacgccatgctggttgccgatggcgaccgccagcgagtcacaaccggtgcgcgctacaaattccgccgcctgatccgggtcggtatagtgataccccgccaacgcctcttcatacaccgtttcgttccctacgtgtcctaactccgcctctaccggaatacccagcggatggaagaaatccacggcttctttggtcaggcgaatattttcttcaaaatcaaaggaagaagcgtcacgcatcagcgagttcatgccgtgcgtccaggcattatggataatgtccatgctacgtccatgatcccagtgggtaattaccggcacagtggcttttttagccatggaaaccatcatatgagagaagtcttcaaatgaagtattgcccacaaatccggtaccaaaggagataataaccggcgaatttgcctcttccgccgcatcaatcactcccatcaacatttccgcattccacacattaaagtgcgcaatcgcgtaatgtttattttgtgcatcattttcccaatattttatatctgccaacatcgctgtttctcccgtttttcattaatcgcaaactttaataacgcctttaataatgtcgcgtttgttattcaccgactcttcaaatgcacgttgtacgtctttgtaatcgtaaatatgcgtcaccattgatttcacatcgaaacgcccggaggagatggcatcaatagtcaccggatagcggttggcatagcggaataccgtctggatggagacttcacggttaattttgaggaaattaatcgctgaatctcctgcgacagtgccaacaatcatgatcttcccgccgcgcatgaccagatacggcgcttgctgagttgtgacggcggaaccggcggtttcaaacacaatatcggcgcccatatcgtcggtgaactgctggcagagcgcgacagtatcttctttcgccccattgataacggttgtcgcgcccagtcgttcagccattgccagccgtttttccagcacatccactaccgcgatattggtcgcccccagacacttacacgcttgcagggtcattaaaccaatgcagcccgcgccgagaatgacgattttcttacccggtttaacatccgccagcattgccgcgtgcattccaacagcagcaggttccaccagcgcaccttccatagtgtccatattgtccggaagcttgtacgtaaaactttccggatggcacagatagtgcgttaaggccccgcgataattcggctgcgtcgccataaaatcaacatccggacaaatattgtattttccttccagacaatagcggcagtggccgcacggcacgcccggctcgatattaacccgatcgcctggcttaaatttgcttacccgattgccgaccgcaacgaccgtaccagcacactcatgaccgagaccaatttcctgatttggatccttcggcggaatgaatggcccggattcaaaaccgtgaacatctgaaccgcaaataccgacatattccactttgatcaatacttcgttttcttttggtactggaatatcagccgctataattgtcatggtgcccggcgtttttagtatcgcttttgaatttttcatttttattcctttatttactcgtgaccttatcaatgctcagactttcaaccgaaacacccttggtctcgattccgatagtcgctattgcgacggcgacgataatcgagacagcgcccagcaggacgaaaacgcccgtcacgccataaccgttgagtaataccgccaccgcatagggggcagcgataccgctgattctgccgacagcgttcgccaggccggaaccgcgaagtttcgcttctgttggccagatctccggcacatagaccgccgaggcataacagacatacatatagacaaaggtaatcaggaaaaagccaattaaggtgataagcaacatgctggtttgcagcgaataaatatatcccagcacggcaatcagaattaataaaccgacacccatggttttgcgcggaattttatccattaccagcatagcgataaatatgccaaacggtgcgccgaacatactcatggtatttaaaacgatcgaatctttgaggttgatgccctgtgtcataaagatggtgggcagccagttaattaacgtgtattgcacaacgttcatggcaatcagcacgcaggaacccaaaataacgcgtttcagtaatacgccagtgagcaacgctgaatacggtacggaacgcggcggcttgccgctgttttcaataacaaccggcggcagcggttttcctgtctgacgttcgatgcctgcttcaatggcctgcataaccttttcggcttcctgataacgcccgcgcgattccagccagcggggagattcagggaagtatcgccaggcaagcgcggtagcaatcagcgacagcacagccgggatcagtaactgcacgcgccagttccattccgcgctaattagcggcgtcagccccattgcaatcagggaacacaatggatatgaccagttgccaataaacgaaacgcgactcgaccaggttccccggtttctgccgggcatgtactcggtaaatccggcgaacagcgtgaccagtagtgcccctaatcccacgcccatcacaaaacgacaggcaatcaggaacatcatattcggtgaaaatgcgcccacgaccatcgaggcaatgtgaatcgcttcataaagaataaaggcgttcctgcgtccggttttatcgccgataatgccgcccaccagcgcgccgagaaacatccccgccgtggtaatggcggagaaggtggctgtcgtggaattatcggtccagcctaactccttgagctgggcaagaattaatccgccgacggcattactccagcaaacaagcagaccaaaggcgacgacggcaaacattgatgaatgccaccggcaatccggcaggcgatccagccgggcgccgcagtgcggttttgttatctgttccatgcgataacgttcctttagcagaagggttattcatcaaagtcgtaggtcatgatcactttaatggctgttttatcgaccattgcgtcaaacccttcgcgccactgagaaagaccgatacgatgggtgatcatcggttttactttgatagcgccgctggcaagcaggcgaatcgcattgcgccaggatgtggagtcataggccatatgcccaatgatgcttttgttccaggaagtaatgtcgttaatggagaaatcgagcggcttaaaccccataccgacgcgaaccacttcaccatttggccgcagcatgtcgatggcctgtttaagcgcaatgttggcaccggagcattcgatcaccagaccgaggttgtctttgccgcaaatctcccggcagcgtgcgacgacatcttccgtggagccgttaacaaacgccgtcgcgccgagttctttggccacagggaaacggacaggaacatcctcatccaggccaaccaccacgatatttaccgcccccataatgcgggccatttggaccgaaaacagacctaacggaccggtgccgatgactaccacgtcctggccgggtaaaaatttggattgctgggcgatagatttataggcgttgcagatagggtccagtactgcggcttcctcgtaatccacgccttccgggatctcccacagggcatggcgatggattttcaggatttctcccggaaccaggcagtatttggaaaatccaccgccccaggtgttgttatccagacccagattcactttttctgtacaacacagaaaatcgccttgttcacaggcagggcaaacgccgcaaacgtgtccgctgttgtcagaaaccacgcgctggccgactttccagtctttcactttttcgcccacccgcgcgatacgtccggcgaattcatgaccgcgaacggagttaaattcgtcggacccgctgtcaacgttatagtgcttcatatccgcgccgcagatcgccgccgctttgatttcgataatcacgtcttccggaccgcataccggctccgggacatcaatcattttgtagccgccaaaggccttgccaaatctcgccagtgctttcattgcatcttcctttgtgtttggtgtgcatcaatgctcatcatacttaaccataaaatctttaaggtcaacgataaatctttaaaacacagataatgatctgtatttaccaaccaagatcacaaactcaacgaaacaaacggcgataaaaccaaaaagatggaagccgtatcgcgaaagacggcgtgaacgcctgcgcaggtttccatggatgaagatgctaatctgctgcggttattttttcgccactccattctgtggcgtgtttctgttttagatgtcgaagaggatcgttaaagaagcctgtgcggtgtttattcaaccggcgcagaagattgtcgacaaatatggtctcgatgggatcgatcttgactgggaatattcgtttaacgtcgcatttaaaagcgcttcgtcagctaatgggccaatgggtcaccctcgtcgtcggcgcgaatgcggaaagtccgaaaagctggctggacgtgaaagctatagccccgtagctcgattttatcaatctgatgacttacgacatggccctatggcacacagtatttcaacgccaatacgtatgactcaaacgcctgacctgctgctgtcagtgaagtctgccggaggaaggcactgcttgccctctcttatgaaaatccgcgctcggtggcgatcgatcaacgcggaccagattaaaaagcgcggactggccggcgcaatgttctgggaataggccgccgatgacaataatcagttagcgaaacagttggcggactcgctggacattaagcgttaatgggtaaaaatatggcgggcctgtgcctgacagcaatgagcaggcccggtaagcacaacgcattggcaatgaaaccgccggatggcggctacctcttatccggctgccgttactgcattttcaatgtcgcaatcggctttgacgtaataccgaaatccgctttgagctgctgcttgcttttcatcaccatctgaccgtgagtatcgatcgtcatatgttgcgcttcggtattgtgccgcgcctgccatagcatcaccagttgcaggctgttttctttctgttccggcgtcaacgccacgccatccggccatttacccagctcaacggcggtggataaacgttgatacacttccggcgtcatgctgttaatgatctcatcaagattcatgatgtgtccgctcctgtggaataatttgctgaatcgttttttcagcctttcagttgatcgccgtttttctcgtcagaaaaggccagcgaggccgagttaacgcaatagcgctcaccggttggctgcggcccgtccgggaaaacgtgtccgagatgcgcatcgcagttaccgcaacgaatttcgacacgctgcatgccatgagaaaaatcgtctatgtaacgaatcgcctcttcgctgacaggctggtaaaagctaggccagccgcagcctgaatcgtatttggtgtgggagtgaaaaagcggcgtatcacagaccaggcagtgataaaccccatcgcgtttattatgtagcaggcgtccggtaaatggcggttctgtgccacgatcctgcgtcacgtagaattgcatttcggacaattttttcttgagttcttctgctgaaggttggttagccatttgctcacatctcactttaaacgtgctcacattgcctgaccgattctaacaaaacattaacacctcagtaccaacttttgttctaaacttgatcattgcgaaatggcggctcacgaatcgtgactgatgtcacattattatctcggttgccctttaaaattcggggcggcgcccccatgtggtttcaagccgaaaggaagagtgaggcgaatcagccgcgcaaaggttgtgcagaggattgatttgtcgcaatgattgacacgattccgcttgacgctgcgtaaggtttttgtaattttacaggcaaccttttattcactaacaaatagctggtggaatatatgactatcaaagtaggtatcaacggttttggccgtatcggtcgcattgttttccgtgctgctcagaaacgttctgacatcgagatcgttgcaatcaacgacctgttagacgcagagtacatggcatacatgctgaaatatgactccactcacggccgtttcgacggtactgttgaagtgaaagacggtcatctgatcgttaacggtaaaaaaatccgtgttaccgctgaacgcgatccggctaacctgaaatgggacgaagttggtgttgacgtagtggctgaagctaccggtatcttcctgactgacgaaaccgcgcgtaaacacatcaccgctggcgcgaaaaaagtggttctgacgggtccatctaaagacaacaccccaatgtttgttaaaggcgctaactttgacaaatacgaaggccaggacatcgtttccaacgcttcctgcaccaccaactgcctggcgccgctggctaaagttatcaacgacaacttcggcatcatcgaaggtctgatgactactgttcacgcgactaccgcaacccagaaaaccgttgacggcccgtctcacaaagactggcgcggcggccgcggcgcatctcagaacatcatcccgtcctctactggcgctgctaaagcggtaggtaaagtactgccagaactgaatggcaaactgactggtatggcgttccgcgttccgactccgaacgtatccgttgttgacctgaccgttcgtctggaaaaagcggctacctacgagcagatcaaagctgctgttaaagctgctgccgaaggcgaaatgaaaggcgttctgggttacaccgaagacgacgttgtatctaccgatttcaacggcgaagtatgcacctccgtgttcgatgctaaagcaggcatcgcgctgaacgacaacttcgtgaaactggtctcctggtacgataacgaaaccggttactccaacaaagtactggacctgattgctcacatctccaaataagttgagatgacacagtcattggtaagagcgactcaggtcgctcttttttttgcttaaagatatacccgtcatacttcaagttgcaggtgtgttggctatgctttctcacccgaatcactgacggaagtcgaacttatcgggatgaatcagggatgtccctggccggaggttacctacggttgttcaaattcgttcccgatgaatttgtcgttcacttgccgcgttactcggcctgcggcctcgcctctacgggccagcgcaagcactggtcaaggcacaagcgccttgtcatgcaactcgaattatttagggttaagaggattgcgtaatgattaataaaatttttgccctcccggttatcgaacagcttacccctgtcctttcccgtcgtcagcttgatgacctggatctgatcgtcgttgaccatccgcaggttaaagcctcttttgcattacagggcgcgcaccttctctcctggaaacccgttggcgaggaagaggtattgtggctcagtaataatacgcctttcaaaaccggcgtggcgctacgcggcggtgtaccgatctgctggccctggtttggacctgcggctcaacagggtctaccgtcacacggctttgcgcgtaatctaccgtgggcgctaaaagcgcataatgaagatgataatggcgtaatgctgacatttgagctgcaaagcagtgaggccacccggaaatactggccgcacgatttcacgctgctggcacgttttaaagtgggcaaaacctgtgaaattgaactggaagcgcatggcgagtttgcaaccacatccgcgctccacagctattttaacgttggcgacatcgccaacgttaaggtcagcggactcggcgatcggtttattgataaagttaacgacgctaaagaaggtgtcctggccggcggtatacaaacctttccggaccgtaccgatcgcgtttacctcaatcctgaagcatgtagcgtgatccacgatgcgacattaaaccgcacgattgatgtagttcaccaccatcaccttaacgtcgtaggctggaaccctggcccggcgttgtccgtcagcatgggcgacatgccggatgacggctataaaacgtttgtctgcgttgaaacggtttacgctactgcgccgcaacaagccacagaagaaaaaccctctcgtctggcgcagactatctgcgtcgctaaacgctaaaagtgaatggataacggcgttgctataggatctgaaaggcgtcagccgccatcaggcatgacctgccggatggcggcgcttacacattttatccggcgtcacaccatatccaacgcggttttcccttttggcgcaggccaggcgttgtccagtaaggcaagttcgtttgctgacaaggcgatctcaagcgccgccgcattttgcttcacgtgttctgtacttccggctttcgggatcgccatcacgcccggatgtgcaatcacccacgtcagtaagatttgcgccgccgttgcgttatgcgcttgcgcaatttcattcaccaccggatgattcagtaaaccgctacgtaaccggccagcctgcgccagcgggctataggccatcactggcattcgctgttgttgacaccacggcaataaatcatactcaataccgcgtgacgccagatgatagagcacctgatttgtcgtgcattgctgtcccccagggatgcgccacagcgcctgcatatcgtcataatcaagattagagactccccaacggcgaattttcccctgcgcgattagccgctccataccttcaacggtctcttcgaatgaaaagcttccggcccagtgcaatagatagagatcgagataatctgttttcagacgacgcaggctttcctcacaggcggcaactatcttctggccgccagcgttccacgggtacacttttgacaccagaaatgcctcatcgcgtcgccctgccagcgcctcgcccacgaccttttccgccccgccgtcggcatacatttccgccgtatcaataaggcgtaaccccaaatccagccccgcgcgcagcgccgaaacctcgcgctgacgttgatccgcgcgctcgcccatataccatgttccctgtccgatggcaggaagcgtcacctgcccgcaaaacgttacgtttttcactgattttatttccttttcaaggtcactcgacggtaaaacaatacaggactcttagaccctacggtaatgtccggcatcataccgcgcaagggggcgattttcttgtcactgacgaacgtcatccgcaatcatgtcgacgatgcgggtaatatgcgcggcgggtcgctgatttagtaataattgacgcatcacattcatatagggcgtcacatgttgaaagaactccagatatcctttacagagataattttgccgttcgccgccgtccatacaaattcgatgtttcggacaaccgccgtgacaggcaaagcgccacgtacagttctggcagcgtgaggaaaggtttgctttagccgcgccaaactgctgctgaaaaggagaggccgccatttcttctaaagagtgttgctgcagattgcccagtttataggcgggaaaaacaaaatggtcacagctaaacacgtcgccattctgctccaccagcaaactttgcccgcaggtcgactgcatcgtacaaagcgtggcgggctcccccatccagacgccaagtaagttatcaaaaagctgtacgaatatgcgtccgacatcgtgacgtatccattgatcaaaaacatcgcacataaaggcgccccacccttcaggcgtgacggaaaagggcatcagcgaaggcgaatcctcattgtcagataacgtcaaagaacgctgcgctttttgcgcgagcggctcaacaatgggaataaattgcaggtgtttactttccagttcctgcgtcaaaaaatgataaatagcgttgccatgacggcatgacgcatcattcacgacagtgagcgtgttgaactcgacatcatttgcctgcagaaggcggatagcattaacgactcgggaaaaagacgcccgccctgacggcgttttccggtaattatcatgaacgacttgcggcccatcaatcgatataccaatcaggaactggtgctgcgcaaagaaagccgcccactcttcattgattaatacgccattggtttgcagactgttgtagatagttttgccgttggcatagcgttgctgcaagcgcaccactttttggtaaaaagaaagaccgcatagcgtcggctctcccccctgccagcaaaacgagacctctgaggatggcgtatcatcaattacccggcggatatacgtctccagcacatcgtcagaaatgacgcgctgcccccggggtttatcaagatagaaacagtacttgcaggataagttacacagactgccgctgggcttggctacggtattgaatactatgctcattcgtcttactcactgtgaagaatgggtatagcataagcgggacgtgacagggcgatatcagccagcattgcaacaattattacgctaattgttagcgcagttgtaatcacctggatttttcatataaaaggctagttttttaaattgatgtaacaaagtataaatcacgtaaggctgtaccatacccggtcaacagcgcatttatgcaagccgccatgttcgcgtttcagttagcacaaagcctgcataacgcaggctttgtcatggtttttccggcaaattcaatcaatcagaatctataggtcacgccagtagaaaggataccggtccaggatttatccaccatcgggctgtcggtaatttcatccgacaggcgggtgtagcgcgcagtaccatatacgctccagttaccggcgaaattatagttagcgctaagttcaagatacgggttccagctatcgttcgggttatagccgcgcaggccgctacgcgaagattctttacgtgatacgccgtaatagtaatcgttctggttctcgctattccattcaaccccgatacctggcgttaaggtcagcccgccattggtataccgatacagccaggccagatcccagacaataccgttactgttatccaacgtatcccctgccagtgaggtacgcaggaatccatactgggtgtgatgcgcgtaagaaacgcccgccatcatagtacttttacgcctgtccagacgacgcaactgatggtcatcgctgtcgcccggtttgaagtacatcggggaccagtatgccatgattgacaacttatcggcattgtcattccacaagtaatacccgccgcccagaccacggaaccagaagttttcgctttcataagcgatgaccggtatcggataaacatcgctatcgtaatctttataagggtgttcaaccacaccaacgcctgcgcccaacgtcaggttgctttcagcgtgcgcgacgctggcggatgttgcaataaacacgccaagagccagaagtttaagtttggtcacaatccataattccttattcaaatgttctgcggcaaaagtgtaaccgccaatacctgtaagcccaactattttacacaatgtaaccgtttaatatcaccatcaccgattattttcagatgatcggctgatgatcgttatgtgaccgggaacgctttttctgatatccaccagccttttctacctgatgagttattgatatgtcatcgaaatccactgacgcgtacaggcaagttttgcaaatgccatctacgcttaatgttaagaaggtgtatcaccggacacgttgatcttctgaccaataaaatggcatgagagttgcttttttttccttagcagagacggcgttcagtctacctcttccgggagcctctactattcatatgaacggctcttaacatgtgcgaaaaaacgaaaggatggcatatcatgaatatattcgatcactatcgccagcgttacgaagctgccaaggacgaagagttcacactgcaggattttcttaccatttgtcggcaagatcgcagtgcttatgccaacgcggcagagcggctattaatggctatcggcgagcctaatatggtcgacactgcccaggaaccccgactttcccgactcttctccaaccgggttattgctcgctatcctgcgtttgaagagttttacggcatggaagacgcgattgaacagattgtctcttatctgaaacatgcggcgcaagggctggaagagaagaagcaaattctctatttgctgggacctgtggggggtggcaaatcatcgctcgctgaacggctgaaatcgctaatgcagcgcgtgccaatttatgttttaagcgccaacggcgagcgtagtccggtcaacgatcatccgttatgcctgtttaatccgcaggaagacgcgcagattctggaaaaagagtacggtattccgcgccgctatctcggtacgattatgtccccgtgggcggccaaacgcctgcatgagtttggcggcgatattactaaattccgcgtggtgaaagtctggccctccattctggagcagattgccatcgccaaaacggaacccggcgatgaaaacaaccaggatatttcggcgctggtcggcaaggtggatattcgtaaactcgaacatcacgcccagaacgatccggatgcgtatggttactctggcgcgctgtgccgcgctaaccaggggatcatggagttcgtcgagatgtttaaagcgcctattaaggtgctgcaccccttgctgaccgcaactcaggaaggtaactacaatggtacggaaggtatttccgccctgccctttaatggcatcatacttgcccactcaaacgaatctgaatgggtgactttccgtaacaataaaaataacgaagcgttcctcgaccgtgtctatatcgtgaaggtgccttattgcctgcgaatctccgaagagatcaaaatctacgagaaactgcttaatcatagcgagctggctcatgcgccctgcgcgccgggcacgttggaaacgctttcgcgcttctcgattctttcccgcctgaaagagccggaaaattccagtatttactcgaaaatgcgcgtttatgacggtgaaagcctgaaagataccgaccctaaagctaaatcgtaccaggagtatcgcgactatgcgggcgtggacgaagggatgaacggtctctccacccgattcgcctttaagatcctctcccgcgtattcaacttcgaccatgcggaagtggcggcaaacccggtacatctgttctacgttctggaacaacaaatcgagcgtgaacagttcccgcaggagcaagctgagcgttatctggagttcctgaaaggctacctgatcccgaaatacgccgaatttatcggcaaggagatccagacggcctatctcgaatcttattctgagtacgggcagaacatttttgatcgttacgtgacttatgcggatttctggattcaggatcaggagtatcgcgacccggataccggtcaactgttcgatcgcgagtcgctgaacgccgaactggaaaaaattgaaaaaccagcgggtatcagtaacccgaaagatttccgtaatgagatagtaaactttgtcctgcgcgccagagccaacaatagcggccgtaatccaaactggaccagttacgagaagctgcgcacggtgattgagaaaaaaatgttctctaatactgaagagctgttgccggtcatttcttttaacgccaaaacgtcgactgacgagcagaaaaagcatgacgactttgtcgatcggatgatggagaaaggatatacccgtaagcaggttcgtttgctgtgcgagtggtacctgcgcgtgcgtaaatcgtcgtgatgttaatgcccggtggcgcttgcgcttaccgggcctacaaagtaatgttctgtagactggctaagcattagcgctatccggcactgacagaacaggcgctcagttggcagtacggggggcatatgacctggttcatagaccgacgtcttaacggcaaaaataaaagcacggtgaatcgccagcgctttttgcgccgttataaagcacaaattaagcagtcaatttccgaagcgattaataaacgctctgtgaccgatgtcgacagcggagagtccgtctctattccaaccgatgatattagcgaaccgatgtttcatcaggggcgcggcggtctgcgccatcgcgtccatccgggtaacgatcactttatccagaatgatcgcattgagcgtccgcaaggcggtggcggcggcggttccggcagcggtcaaggtcaggccagccaggacggcgaaggccaggatgagtttgtttttcagatttcaaaagatgaatatctggatctgctctttgaagatttagcgctgcctaatctgaagaaaaaccagcatcgccagcttaacgagtataaaactcaccgcgccggtttcacctcaaacggcgtaccggccaatatcagcgtggtacgttcgctacaaaactctctggcgcgccgtacagcaatgacggcaggaaaacgccgcgaactgcacgcgctggaaacggaactggagaccatcagccatagcgaaccagcgcaactgcttgaagaggagcggttacgtcgggaaattgccgaactacgggctaaaatcgagcgagtgccgtttatcgacacctttgatttacgctataaaaattatgaaaaacggcctgagccctccagccaggcggtgatgttctgtctgatggacgtctcgggttcgatggaccaggcaaccaaagatatggccaagcgtttttacattctgctctatctgtttttgagccgaacatataagaacgtagaagtggtttatatccgccaccatacccaggcgaaggaagtggacgaacatgagttcttttattcgcaagagaccggggggacgattgtctccagcgcgcttaaactcatggatgaagtggttaaagagcgctacgacccggggcagtggaacatctatgcggcgcaagcgtcagacggtgataactgggccgacgattcaccgctgtgtcatgagattctggcgaaaaagctgctgccggtagtgcgctattacagctatatcgagattacccgccgcgcccaccagaccttatggcgcgagtatgaacatctgcaggcgacgttcgataacttcgccatgcagcatattcgcgatcaggaggatatttatccggtattccgcgaattgtttcagaaacagagcgccaatcaaagcgtataaataaatccgcccgttcatatgtcgggcggattttaataaacctggtgttcggtttttatgactgaagcaattacccgcgaatagtctgaatgaaggtattccggcatatcgggtaatttaacccattaatagaattccatcatgttaataacaccaaggccaagaccaaggccccaaatgtcctggttgccccactccaggaggaacaatgtgacaggcagggactttatcaaaaacatgatccaaaacatgtgaaaaaggatcatccgccatcgccgacgacgtaaaacctgctgccagtaatgcaaaaaataaaatcacagccatctctttaaatcgtttcatagagcctcagaacggaagtaaattattattcttaccacttcacactcttttcatcatcataataaaggttattttctttttgtcacaaatagatcagtattgttggttaaaaatttagtttttatcacaatagtcacacatgaaaatataaacacagcgtattaattggtttattaaatcgagaatgatttttatttcataacatcaacacgttttatttttaaacagtctattagaggaattctcatcgctatggtaaactaacgcatccgactttcagggctgtagttcatcatgaatttgcatcataaagcgctcaggcactttatctcggcaagcgtcatcgttttgacatcgtccttcctgatttacgaacttattgccagcgacagggcaatgaatgcctatatgcgttatatcatggagagagccgattcgtcgtttttgtacgataagtaccagaatcagagcatcgccgcacatttgatgcgaacttttgaagcgccgggagaccccgtcactgcagaaaaacgccgcgcgttttgcgacgcctttgaggctattaacggtacgcacggcgtcaacctgacccggcataattatccggggctacatggcaccctgcaaaccgccgctacacagtgtaccgataatcttgatgacgcccttttactgcctgcatttgatcaggcggtaagcatcaaccgttcgcaggacgaccacagtcacgggctgggcacactggagcttaaattccgttattacgttgatttaaataaacattatgtccatttctatgatttaatcaactcacggcgcttcgccatgcatcgttggacttttttacaaaaaggcacaatgggtattaacagaaaagatatagataaactttttaccggccgtacggttatttcaagtatttacatggatgatattacccaggaaaacgtcatgagctttttaacgccagtctatctggcgggaacgttaaaaggtatcgtgatggtggatgttaaccaggataatttaaaaaatattttttatacccaggaccgtccgctggtttggcgttatcttaacgtaacactaaaggacatggactccggaaaagaaattattattaatcaaagcaaaaataatctgtttcaatatgtgaattatagccatgatatcccgggtggactgcgcgtttcgttgtcccttgatttaacctatttccttgtctcgtcctggaaagcgctggccttttacttactggcaacggcgctcctgcttaatatggtacggatgcactttcggctttatcgcaacgtcacacgcgaaaatattagcgatgccatgaccgggctttacaaccgtaaaatattaacaccggagctggaacagcgactgcaacgcctggtcaatgccgggacgccggtgacatttgtcgctattgattgcgataggttaaaactgatcaacgatacccaggggcaccaggaaggcgaccgaattattaccctgttggcgaaagcgattaaaacatcgattcgtaaaagcgattacgccattcgcctcggcggcgatgagttctgtattattcttgttgattacgcggcggatttggctatccatctgccggagcgtattattcgtaacctgcaaattattgcaccggataagacagtccatttttccgccgggatttataatatgcagcccaatgatacgattaatgatgcctaccaggcttccgatgcgcagctctatctgaacaaacagcaaaaacaacatcgttcatcatagtgcttcgcagtaaatgttcatattgcaccaggagtaagaaatggccgaaatgactgaagtcgcaaagggtgtcgctacacaccaacgtttagtggctttattaacccaggagaacgcgcgctatcgtgtggtgaaccatgaagcggtagggaaatgcgaagcggtatctgaaatacgcggtactgcgctgggccagggcgcaaaagcgctggtctgtaaagtcaaaggcaacggcgtcaaccagcacgttcttgctattctggcggccgatcagcaagccgacctctctcagcttgcttcacatctgggcggcttacgcgcttcccttgccagcccggcggaagtcgatatgctgaccggctgcgtttttggcgcgatcccgcctttcagttttcaccccaatctgaaactggtcgccgatccgctcctgtttgagcgtttcgatgaaattgcctttaatgccggcctgctggaaaaatcagtcattatgaatacacaggactatctgcgcatcgcccgaccagaactggcagtcttccgccgctttcagtcatcgccaacggcttagtccccttccccttcaaggagcaatacagacacaacgataatgataaaaatggcgaaaaacgacgccgttatcatcagcgcttcaagaaacggtggatcgtacataattgtatcctcaggaagacaacaatgacggttcaccggttagcagtacgctgcgttgatggcaatttaatgacaacgccgtttttcacgtagaaattgtctttcaggcagttgcctgaaatccgcatcaatcgttaaaaaggcctgtgcgctttcccgtttgggcgtaaagtagtcaggcttactttttggcaaggaaaccataatgtttgatgtcactctgctgatcctgctcggactggcagctctgggatttatcagccacaacaccactgtcgccgtctcaattctggtgctgattattgtccgcgtaaccccgttgaataccttttttccctggattgaaaaacaggggctcaccgtcgggattatcattctgaccatcggcgtgatggcccccatcgccagcggaaccctaccgccctccacattgatccactcttttgtgaactggaaatcgctggtcgcgattgccgtcggcgttttcgtctcctggctgggcggtcgcggcattacgctgatgggaaaccaaccgcagctcgtcgccgggctgctggtcggtacggtacttggcgtcgcgctgtttcgcggcgtgccggtcggcccactgattgcggcggggctggtctctttaattgtggggaagcagtaactcgcccgtcagatactggcctggcgtctgccccaggccttttttaaacatggtaatgaatgccgtggtggaatcataacccagcatttgcgccgtctgctgtacattacgtcccgcgatcagcgcttgtagcgccagaattaattgcaactgatgacgccagcgacgaaagcttagccccgtctctttgacgaccagccgggcaaggttacgctcgctcatcgcgaatacgctggcccactgccctaacgtattccatcgcgcgggctcctgcgccattgtctcaaccatttggcggattttcggatgccccgataccggtaattgcaattgttcctgcggctgctgcggcagttcatcaaacaacacctgaataaggcgctgcgttggcatttgcgctctttcgggatcggttctgcgcgccagcgacaaaatcaactcccggcataacggcgaaattttcagcgtgcagcaacgctccggcatgacgaccgccgcaggttcaataaataaaaagcacagctccgcccctgcggtcacatgattactgtgcggcagcgagccggggagccagacggcatactggggcggaaccatccacatcgcattttccacctcacaggtgatcgcgccgtgcagagcgaggatcaactgtcccttgcgatgctgatggcgagggctaaacagttcatcatccctggcgcgaatacaaaaggccacagcggcatcgtggtgaaggtcgggatcgtaaccgtccagtctcaggccaatcattatattgtccgattttagcgataaattgtcattttagcttgattcatccaaacagtaaaaactgttaaggtatcgcctcgcctgacgagatgagaaaacgatgacgacagccctttcaccacgcggcaaacagggcgctttactgattgccggtattttgatgatagccactacgctgcgcgtaacatttaccggcgctgcgccgttgctggagacaatccgttcggattacggtctttccaccgcccagacgggcctgctaacaaccttgccgcttctggcgtttgcactggtttcgccgctggcggccggtattgcccgccggtttgggatggaacgcagtctgtttgccgcaatgctgctgatttgcgcgggtattgctctccgctccctgccctccgctgcattgttgtttgccggaactgccattattgggtgcgggatagcgctgggtaatgtgctgctaccaggattgattaagcgcgatttttcacaacatgtcgccaggctgacgggcgcgtattcattgacgatgggcgccgccgccgcgttggggtccgcgctggtggttccgctggcgttgcacggttttggctggcgcggcgcgctgttaatgctaatgctgtttccgctgttggcgtttcttatctggttgccgcagtggcgcactacccgctcagctaacctgagtagctcccgggcattacatgaacgcggtatctggcgttcgcctttagccaggcaagttacgttgtttctgggacttaactcactgatttattatgtgattatcggctggttaccaacaatactcatcagccacggttacagcgaagcacaggcaggatcgctacatggcctgctgcaactggcgaccgcggcgcctgggttagccattccgcttattttgcctcgctttaacgatcaacgctggattgccgcgctggtctcactcttgtgcgcagtgggcgcggcggggctttggtttgtgccgggccaggcgatcatctggacgctactgttcggcttcggttcaggcgcgacgatgatcctcggcctgacgtttatcggcctgcgcgccagttcggcgcatcaggcggcggcgctttccggcatggcgcagtcggtcgggtatttactggcggcatgtgggccgcccgtcatgggaaaacttcatgatgccagcggtagctggtatctgccgctatcgggcgtaacggttctggctatcatcatggcgattttaggcctctacgccggacgcgatcgagagatagcgtcataaataaacctgatacccacttgaatgcctgatgacgcttcgtttatcaggcctgatccattaaaatcattaccgctatccgacaaaagtaccgtaagcgacaccatcacaggagggaaaaatgcgaatccagtgtaagcgcgtctatttcccggcggaaaaagacgatggttatcgggtattggttgacaggctatggccacgcggcattaaaaaatcggcgctggtctatgatgaatggaataaggccattacgccctccaccgaattgcgcaaagcctttcatagcgaactgattgattttaaccacttcgcgcagcaataccgggcagaacttgcgcaacagcatcacgaaggcaaacggctggcggatattgcccgacaccagccgctaacgttgctatacgccgctaaagatactcgccagaaccatgccattgtgctggcagagtggctacgagagctgtgattgtcgtgccgccgcctggcctggttgtctgtccggggacaacggcatcaaatgttctgctcgcacccaggcaaaaccgtgctgaccatcggcggaggctacgtcgcccgtaaccagccacagcgcccgaggcgcttctttcggcagtaaggtgacgtgtccatttaccggattaatgaattcatctccgggttggcacaggcaaaatagctcaaccgatttaccaatattccgccgtccggcgggtgtcttagcgccaataactattgccaacgcgcccggctttaactgaaacatattttcttgcgccgcatgaaactcattatcagattgttcttaatcatatcccgtcggaccgcaggttgtcactttttcgtatcagggtgctctctgcgccataatgcccactcatcaatgatttcgccattgggcaatttgcaatcggaacgcacgccttgtggggtctgcaccggcatcagcgtaccgccctgttgctcacagtagacggctgccggattaggcatcccaatgcgcggcggccggggggcgttgggttgcgacgatgaacaagcgctcagcagcaatacgcctggcaacgcaatccacgtaaatttcataacgactccttaaagcgatattttgtccaggataacctggcgggtacgctatttccatactttctgtcagcgctttagtgggtgtttatcccgggttaagtcagtaatagccacgccctgtcacaaagcaaccgaccttttgtcgctgagaaaaccctgctattctggcgccccctgaacagtgaaggtaatagcatgagagtgggtatcctcttccctgtcgtcattttcattacggcaatattatttttggcatggttttttattggcggttacgccgcgccgggagcataaccatgaggaaaacaacgatggtgttgatgggcatcgcgctaattgcggcggcgggtaccgaactgggctggtggtaaattcattttgaataataaaggctacctgtcgtagcctttattatctctgaaagttctgcgtttagcttttgatttttctgtagattaacagcacgacaatcgcaccgatcaccgcgactgcaaagctgccgaagttgaaaccatccactttgccaaagccaaagaacgtactgatccatcctccgactaccgcaccaacgatccccagaatgatcgtcataaagaatccgccgccatctttacctggcatgatccacttagccaaaatacccgcaataagtccaaaaataatccatgaaagaatgcccattttttcctcacttatgtcttaacgttagcggtttatttgccgttaaaaagaatagcacatcgtcaggaaagtgaagtttgtgatatccatcaccttttagcgtcgtggataaaagcgcataaatatcagggttgcaatcattaatgataacgattatctttatcaacaccgagtagttgagtttataacccacctgttcggtacgacattgctcacattgcttccagtattatttgcccgcctcaccgagtgcgggctttttttgctaaccgctatctatcccatgtcgaattcatggtctttttcagccgcgctattttgcgtgatacggggtcatctccagcgccgtacattcatcctgcttgtcctgctgcataaacaccacggtcaccataaacaaaccgatcataaatggcacttcataaagctcttcaatcaaatctgtgtaacgagcgttatgcaggaatatcggcgacaaccaccgatgatgctcgacagtgtcggaaatcagatatgaacatgccgtcacggtaaacagccacaatggcagaggagcgtcccgtaggcgacgaacaatctccttacggagcccggcagaaaacaggactggcaagactaacgcagcaattaatagcactgaaatcgttctgaacagcatacgcggctcgtcagggaaatagtcacgcccccaactggtgcttctacccaatagcaccacccaccagacaacagcccatagccaaaactgctttgccccttcgggacgggaaagtggccgtatataccaggcggtaaatagcgccccaaacagtaaccataacgcttgtccgttttcaatccatcggaccaccacgccgttaagcaaaggcaattgccagtccgccgtaaacgggatgaccacagcggcaagcgcaagagtaagtgctgacgaagttaatcgggtatcgagtttcatgattataagactcttctggtttttaatacccaatcataagttttatgaatacgctctcattagcaaacaatgcgatattcttaatgttttcttaatgtttcttttcaacccatgtctgatgtaaataaacagcgcttttcaatacgcaaaaaccgcatcacgctggcgacgcgcgatgcggcttctgatttaaaaaatcactttatatcaaatagatactacaagatccttaccaaccgcaaacgtcgtgttcgttttcggtatcgtaggaacgcacggtattgaccaaatccttcacaacttctgctgcaacttcaggtaccagcaacgtcatcggtgcttccgtttcatagtccacagagacgccgttgctattattcgtgaccgtgacggtataagtggcctttcccattattattctctcccggcatgaatgacttttcgtgaggtcgccccttccatcagtacttccggcgcgacaaaaaagtcgatgttaaaataggtatcatccgtcatgacctcaatattgtgccacttttccggaggaaacacgccaaactcgccggcattgatcaccatgatctcttccggctcagagcaatgttcatcagcgtatccgagatatttgaccgccccctgcatcaccgagagacgaggataaacgccgggtcgcgttcccttatcaaggtggcgttcgaaaattccggcaggcgccgtctctttgttccagaagggcgtggaacgtgtatggatatgattttgtggaatttgccgcatttgcttccctcttcccgcaggttactcagcgataatctcatcgctgtcgtaaaaaggttacgctccaaaaacagcattttaaataccatttattggttactattttgctgttttccacgcaataacaccgaaaggagagcaatgacccgccgttgacgacgggtccgggagggttaagactggagcgttgccaggcgggcggcaaacccgacgaaaagaaggccaatcaaagaattgcccacttttgccagtttctttttggtaccaatatagtgggttacaaaagcgccagaaagaattaaaaagctcagatagcaaaaactgacaatttcaagggtggtggccaaaataaaaaatgacacgccagtatgcggcgcagtaacatcaataaattgcacaaaaaaggaaacataaaaaagtatggctttaggattcgtcaggctaagaattaaagcacgcttaaaaatagcgccaaaaggaactaccgtttccgtcgccgcacgcccttttgaggtcagagtggcgtaaaggatttttgcgccaaggtagagcagataaaacgcgccgagatagcgaacaatgttaaacagaaccggcgttgttttgatcagcgtcgccacgcccgcatacgccagaaacattaatatcgcatcgccgataaacacgccgcatgcggcaagatatcctcctttaaccccgcgtcccacgctatttttaagcacaaaaagcgtattcggccccggtaccagaacgataaaaatcgccccgaccaggtacgtccaataattcagaacaccatactccgcgaacacattaacctcttcctgaaaacatttacgcttagctgcgaaacagtatgctaacgaatgcaccggaagatgggaagcgaaaccacgtctcaccagccgctattccgccacgcttatatccaaatcacctaaaagcgttcttttatcgctacctccgcaggcaatcaccaggtattggcccacctctcctcatgtggagttaacgcgcgcgtcgcaccaaagataaggctgccaacacattactgatatcgctctcattcagattcggcgcattaaactgcgctctcagccacaccatatcgtcgtggctgaaagcgccgaccatcaagcgctggctgataatgatcaacatttgattatcaagttgtcgaatacgttgccgggtgaccgacaaggtttgtatcggaaaggagggttccgagccggttcgccactgcgctaaatagcggtactgtatcgctttactggcatccattagcgaacgaataaaaggggttatcgaatgcgggtccagaccgttatttttcgcttcttcttcagcctcggcaaaaacattttgttcacgtgtgaaatcctctatcggcagatggtgcttcattttataagcagccacatctttcattaataacatgcgttcattgagcgcggttaagagcgcgccaagcgataccgacgttaccgaatcggcaaaagtggtgctgcacatcaataaagaacaaagaaaaatggcgatatgacgaatcattaatcaacctccttttacggaggcttgacagtaatttacctttattaagataacattaagtaattattacagatgggtattaatgcttattcgtttaaactggagtgatagaaagaacaggccgttgattctgcggaatcttcaccttcatttaaagtgtataaaatatacaacaaatcacacaaatgtgatgcatatcacgtttttatgattttttattacagttttatgatataggtctaactttaataggtcactaatttctctcccccgctcagggagatcggcttcaatttacatcgaatatggtgaaatatgactaccattacactagtcaacgaacaaaatagtactggcaatcctttttctgcacatatgttatgtgaacagcgagctattcaggaaattacttacgaactattgcaatcgcagcagcatgtctcaaataaggatatcatcgccaaacttattgaaaaactggaaacagaaaaagacgtagtgcagcttgatatttaccgtaatgccttagaagccgttttgtttcagacacctgacgacatctaatatatacccaaaataattcgagttgcttaaaggcggcaagggagtgagtccccaggagcatagataactatgtgactggggtgaacgacaaatctgccgggagcagatttgaacgtcgcttgcgacggcccgtcagggcgaggcctatggatgggccgagtaatccgtagccaacacataagcaacttgaagtatgaagggtataaacaagggaggggttactcctcccctgttcgttaataatgcagatgcctcaacgtgcggtgcctgatttttcgtagccgtttgcatggatttgcggtgcaacatgctgcatgctttcgggcatctcatgctgccggtatacggctggcagtaatgttaagcctgagccatttttcacatgaagactaaatttacccgattcttttaaagcctgaataagattttcctgcgcgggagttaatgtctcatcatgccacagaacaatatgctcgaaagacgttgataaaagatcgggcatcggcgcctgccaggggatgacttcaactcgcataccttcactacaatatttaatcgtttccagccatagctcaatggggtcgttcagcgaaaacgcagcaataagcattgtgcctgctggcgcctttcgtacgctacttagctggaacgtggcgtattcaataatcgcagtatccagtaatgccttttcaaatcggcgtgcatcatcatcgcctgcggacaaccacagccgtaaaggacgcagtattgactcaattacgatacacggcggaatttcccgaccataacgccagagtaattttcgcaatttggcgggttcgaattttctacactgcgctaaaatctcttcctggtagaataaccatcccgagcggcaatgcgtttcttcaccatagagggcaggtttaatctcttttaatgaaaagcctttgcttaacgcgtcgataatatgctgtattctgatagcatcttctatgcaataaaaacgattgccagcttcatctttggtaggttgaagcaggccatagcgttcccaggacctgatatttgctgttgtgacaccacactgcgccgccattgcgctaatactaaaagtagccatgcctgtctggcctcatgatgatgtaagaaagcatagtgaacctaaacgccatcagaagcaaatcattattaagcaatgaccttactatttacacgggaaattacattatcaacattatttattgtaagccagtgcgtaaaggctttagaaacggacagtatttgatagtccagaactgttctacaacctaatttagtcagaacatggtagcgtactgagtaaatagtttttaaatgtacattcagctcacagcttatttgtcggatatccattcctttaacaagcatcgccaaaacatttctttcattcgccgttaatctgactttctctgacctgggaaaaaattgaccagcagcggccaaaattagtaattcgcgccactcagcaatagaggcatcgacctttattcgatatatagcatgatgttcatcaataaagttatattcattatgggtaacaattccaatgagtaccgctttaaatgtggaagtaatatactgctgtacggtgtagtaatcgtcgatatcaaaaataatataatttacgttgccagctattattgcgacgtccttaaataaggactccagaccataattaagaaacaggttttcgctcaatagtcttgtatctgtctttaaaacagatgatgcggaaccagtcatatccacctcaacaaaacgagagccatgtgggaatatccattcgatggcccgcataagatcatctgcttacttcagcgatgagaacctattaagtagtagttgaggaacgccgtttgcgcaacctgacagacgtcctggggcatcttatgtgaactgcgtggggatgtgcgctttggcaaaatccacaaagcgtacgaccgcaggcagcaaaatatgccagtcctgttgctccagacctaaatattcacgctgcgccgcacgcaacgtggcagcataatcttctggcaactgaggtaacagccagtcagccgccgcatccttagaggtaaatctcccggtagaaagggtataccagatacgcgccagggttaaaacgatatgatactcatctccctgcacatctgccgtggattgccaaaggtcgaggggataacgcaaggccttcagcaactgcgccgcaggggctggcgtgaacagccgttccgcgcgttctccctttagcggtatactggtttccagaatttgggttatcagtaacacaatgtcccagtcctgctgcgctggttcataaatcccctgacaaatgtcctctcttagccactcgccaaattgcatttcccgggcaggtggaaaacaccagggaaccagctgcgaataaagcacgacagtgacctccagagcgcgtttttctgccgacgcccccggcggcgatgaaagcgccagcaattcctgcatcagcgttgcgcgttgggcctccgtcagcagctggcatattgtcaccagtagatcaatgtcgctgtttggcttcagaccgcccgcgacagcggaaccatataaatgaatagcacgcaacgtatcgcctgtgacacgagtaatcaggcgacacgccgcttccgtttggcattgaatcgagggcggtatggacagcgtcatcgttgctccgggggcgcaggtattttttatattgattgccagaaatatggcataacggcagaaaaaaagcccgctattcatagcgagcttttaacattgcaatcagacttaatgatgtagcatttcgtcaacgacctcattcgcctttaactgataaggataataggtaggccagttttccatctcttgcaacaatgcctgctgcgaggtatttcccataaagatatggaagtgcgccgatttgcgcggggcaatgatatgatcgctaaactgaacatatttaggcgctttgctattcgcatctttacattcgaacaggtagcgcaccccttttttacccgatgcgtaagtcagaattttatagccggcataattgtatttacaggatgcaacgttattgtcgcgatggaattctataacgccattttcaatgccgatcgtctcaacattcgtcacgtatcctttgcgataatacgctttaatatcctcaaacgttttctccgggtctttcttcgccttttgtctgaagacagggtccagctcgccgctgaccagataaggatagacggattgccacataccatcccagtcggtgagcgcgcgatcgcgtacattcgcgtcatcaaacacgcccgctgccgctttttgctcaacctccgtcatcggcgcgccatgagcatgatgaccatgcgcgaaggcaggactattgaccaacagcattcccagaagcattgtcagtttttttaaatgaatcaccaaaacgttaccctcatctttcttagaaagatgattgttatattataacattgcacttatttcaacagaaactcagcggccaccgcgcaggtggccttttttgatatcaactggtccgccatcgaggaattgaaccccgaaccttagaggtagaagctctatgctctatccggttgagctaatggcggaagaaaaattacgcggccattttaaggcaggcgtctgcgcattggctgcatgcccgcgcgcaattctggcaatggtcgtgatcgtgccttgcacactcttcggcgcaggctttgcagatatccgcgcacaggcggcataatttttgtgagtactcgctttccaatgccataaattgcgccgccaggcgacaaatggccgcacattgcatatctaactggatgcagtgcttcatcatttcgacgttatcttcacgcagacaagaagaggcgcagatatcacacgccgccgcgcattcataacactgctcaatacactcacgatgttcttgttgcataaatgactccttattttattaagaggagtagataagtctgcacagaaacgccgggatagccaaacggctacccctctttttcatactttttgaacaaaagtgctgaataaaacagcaatagtaaagccggaaatcggcctccgtgatgtgacgtctatactgtaatgttcatctgcttttcatcggaggtaaaatggagtatttagcacgactaaatatcgttgcgatgctgatgtcaacgacgttctggatcaatctggcggtcgtttttttcgtcaccctcattacttactggctcatcaactggctacttaatgtggtctataaagcgctacaacgcccggataaaaagaatgatgctcatgggcggctgcggcctattgttttcgagatgctgaaaaagaccagtaagatgctaatcttttttgccgcatttctctttagcctgcgctttgtcgccctgcccgaccggttattctctaccctctctcacgcctggtttttagtggttgcgattcaaatggcgatttggcttgatcagggcgtacagtcatggatgcgtcatttactgtatgccccaggctccaataaaaacccggtgacgttagtcattcttggtatgattttgcgcgtgctcgtctggtctatgatgttgctctccatcctggcgaacgtcggcgtggatattaccgcactggtagccagcctcggcgtgggcggtattgctattgccctggcggtacaaaccgttctgagcgatgtcttcgcttcgctgtcgattggtttcgataagcccttcgagatcggcgatttcgtcgtctttaatgatgtagccggtacgattgaacatatcggtttgaaaaccactcgcatccgtagcctcagcggcgaacagatcgtttgtgcgaacgcgcaattgttgcagcaaaccatacacaactataagcggatgcaaacgcgtcgtatcgtgtttacttttggcgtcgccactgcgacaccgccggaaaagttacgcctcatcggcgatatggtgaaaaagattattaccgatgtcggcgaaacacaattcgaccgcgcccatctactggcctttggtcaggatcggctgacctatgaggtggtgcatatcgtcaataccgcggattacaataaatacatggatattcagcaagagataaatatccgtattattgaaaaactcattgagaatgatatcgaactggcgctgcctagtctggttgtcagagcccctgtacaggttgaagagaccagggactacagtaataccgctgatgcaaaaaacgcagataaacgcgtcatgcagtaaaatctctgccgacaataccgggaacccatgggttcccggtgcgttaacggcgacacggcaatgcggagaaacgacttgcggctattccacctgtaaatggcgggtacagacttgatcaagtagcgcagactgatgactaatcaccaacatccctaatgaacggctgcggcacacctcaagcacgtatacccatatcgctttttgaatagacggatcgagttgcgccgtcatttcgtcggcaatcagaaaacgcgttcgtgggtcaagcgcgcgcagtatcgcaatacgcgccaactccccgcctgagagctgcattggccgacgcgtcagccactcgggctgcacatgcaaacgcctcatcgtttccgggtcaggctgccaggcatcacgtacagcgtctccggcgcttcgccagggattaaacgtcagttcaggatgctgggggacaagctgtaccggacaatactgatgcaggggtaacgggctgccgtccagcagaacgtcgcccgccgtcggcttttgccatccggccaggacgcgccccaacgttgttttccccgttccgcttggcgcatgaattcctacccgttcaccggcagaaatcctaaacgtcaggttctgccataagactttcccgccctgacgaataacgaggtcgcggcagctcagcattctattccctctccggtcggcataaataacgggtttagttcaggcaatgcttgccattgccgttttaacggctcactcatctcttccggctgtaactgctcgcagcggatattgtccgtgatataaccctgatgcagcgccacaatgcgatcggcataccgcgccgccagcagcaggtcatgagtcacccacagcacgccgcatccccgctcgcagagacctcgcaagtgctcaagcaactggtttgccagtgcggtatcaagccaggcggtgatctcatccgcgaggatataacgagcctggctgagcgaggcgtggcacgccagaattcgtttagccatcccgccagagagctggcggggaaagcgttccaggactgtcggttcaagatcgctttgctgtaatagctgtaccatctgcgtctcatcccaggcgcgtccggtcagatgacatgctctgttcaaatgttttctgatattcagcatgggattaagcgcctgtaccccctgcggcacgtagctaaacgtattgcccctaagctgcctgatggtatgtctgtccagccggttgccatcaagcgtaatctccccccgaaagcgtaagttttccggcagcagatcgagcaggcattgcagcagcagactttttccctccccgctgccgccaaccaatgccaccatttcgccgggtgcgatatcaaaagagacattctgtaataacggcgaccagcgtctcgtgccataccagcgataacgcgcgctttccagcgtaacctgttgtaaacttagcatacgtcactccttagccacagccgctgaatggcgcgcgcaaactgatcgaagagcatcaccagcgtgaataacattaggccgggaaacagcaccagccaccagttaccatggctaataaaccgtaacgcatccgccagcaacagccccagcgaaggctcatgcggcgccagcccaaaccccagaaaacttaatgccgcgctgtgcaataccgcatgaggaaacatcaataacgttcccgtcaaccattgcggcaatagcgccggaaaatagtgatatcgccagcaataaaggtgtccatgccccagacgataggtcaatgtcaggtagtcactctgcgctacccgctccgcgtcggcgcgcagaatcagcgccagacggggccagtgcgttaacgccacggccgcaatgacgccgcttttaccgccgccgagcgtaaaacagataaggatcagcaaaagtaaatgcggcatggcgagcatagcatcggttatcaaccgcatcaggaggtccagccggggatgaatgcgcgccactgccgccatcactagcgcgataacgccgctgcacagcgcggcgccaacgccaatttgtaaactggtgaaggccccctgaaagcaacgaagccatacatcgcgccccagattatcggtgccaaaccagtgctggatatcaggcgacagatgccgggcaagcagattaacctctggcggctggctcaacgtggcataaccgtatccggcaataaacagcagacaggtaacggagaggatcagacgaaacaacgtcggggcaggattatagagcatcgggacgctccagcgatcgattaagcaccaccacaagccaggctgaaatcgtatttccggcaaacactaatagtgtacagaataaaacgatccccatgagtagcgggacatcgccacgcagaccggcatcgatagtggcctgtcccagccccggatacgcaaagactttttctgccagtaacgctccccccatcagttcgcccagagaagcaaactgtaaacagagtgctggggtaatcgcatgacgtaacacctggtgacgtaacagcgaccatcctttatccccctgagcgcgcgcaaaacgaataaattcgctcttcattacgctggctattttttctcgcgtatgcagcgcaatttgccccatgcccaatagacttaacgcacataccggcaacacaagatggcgtaaacgttccgataaaagagctgttcctgcattatttccggggtcccaggcgcaacaaacaggtaataccggccagcggacggcaaatagcgccagcaacagcattgctatccagaaagtgggcaacgatgacaataagtagctgatacggcaaatcatcttatccggccaacggtggagaaaacgtccggccagaaaacccaatgtcacgcccagcacaccagacaatagccaggcgcccgccagcagcgcgaatgacgtcgcaaaacgttcccggatcacgctggcgacaggcatgttgaacagcatggaataccccatgtcaccctggagcagacgccaaaaccagtgaccgaaacgctcccacagcggctggtcgagcccccagcgcgccgcaatccgcgcatattgttctggcggaacatggagcagatcgttgccaatataagcacggataggatcaacgggcgaaaagctaagcaaaatgaaggtgccggcagccaccagcaccaacagaataatcagccgcaaaaaatgactgaagaacaatttcatcaccgacaggtccaggtccagtcatcaagattgtttaacaccgaccagctaccgtggatttctggcgcgccttttcccagatcaatacaggggttggccagataggtatgctgaatattaagcagccatgcccatgccgcatcgccctggacgcccgcgccctgcttcccatcccactcaacctgctgccagaaaggaatcgccttttgccagtcaggcgcatctatagcctgtttcagatgtgcttctaccgcagggttgctgtaatagcccgggttataatattccacaccagcggctttcccactgtagtgatggaagagttccatcgggtccagacttccccagccaaacagcgtagggttagcgtgcatatggcgctctacagtttcccagcttcccgattgcaacgagacgacaatgcctaaaggctgcaacatggcgcgcaccgcctcggccagatcccgtcgggtgctgtcgccactggcataccataaggtcagacgcgcttctttacccgctttttcacgcacgcccgcacggtttatcttccagccagcctcttccaggatggcgcgcgcttttgcaatatcgccatcgctgaatatcactgaaggattttgccacggcaatccctgcaccgcgctataggcgggtatcgcatggccttccatcacctgttccgccagttgcttacgattaatggcatagttaattgcgcgtctgatagcgacatcagcggtcacatcgttgccgacaggataaccgttagcatcctttttaccggcaggcaccatcgggaagacaatgccccggttttcaacgctatcgcgtacccagagtttaagattatcctgctgcggggccaccgccatagaaggggcaatgcgcaccagtcccaactgtccgctgcgcgcggcggcataagcattatcttcatccagaaagacaaaaaccagccggttaaagtcattctttttacccgcataccagggattagcttcaacgatcagttgctgacccggctgaaagctgaccagtcggtacggaccggcgcctatcggttcgcgggcgaacgttttttcatcataacggctggccggaacaatccctaacgacccgagtacattcacaaaggtgctctgcggatggctcagcgtcatctcaattcggcgtgcgtccagcgctcgcgcatggctaaaattgcccatgtcaattttaccgccgctcttcgccgctttattgtatgtaaaaacgacatcttcggcagttaatggcgagccatcggagaatttcagcccgggctttaaggttagcgtccagattttaccgacggggctggtatccactttttccgtcagtaaattaccccaactcatgtcggcgttttgcttaagcaacggcgcatgaagcaataagtagctgccgtggctccagcccagcataggatcaaagccttccgttggctcagggccaatggccagcttcagggtacgaccgtctgccgtgtccgacgcggcgaaaagcgacgaagtgaataccagagtcagcgcgcacgtcacgagcgccagtttgcctttaatcatcaatttgtcccagattatgcgttgtttttgtttctcccggcgcagcataaacgtcgggagacctcctgaggacggcattatggcgagcatttgtaatgaaaaaattgacgcagaacagaaagtatgacgatcttttaaaaacatcatacgcacaaacgtcgggagcgccaacgtgagctaaaggccgcttttgacggggataaaacgcaagggaaatgacgccaggaataccgggttaattaacgccatcttattctcttatttcctttctattctgtattgcgtcttcccacccgacgctgttcattttctcaacattattagtcagtactgaaacgtaagaaggtatcgtaattagcgcctcctggctttaaacctaaaccaatattaaacgaaccgggcgttaatgaaacttaccagcagaacgccagtcatatggcaacccgatgaaatgacatgctatggagtccaaccgaaaaatgttaacgccgccagggctcgtgatgatttttttagccgtaatgttctcattgctgacaggatgcacaagttataaaaacacggcatggggaatatatccggcttcaacggatatttgtccgtcaggtacgacatcaacaggagggtgcaaagagtaatatcgcatatttaatatacaccacttttttaatgactgtccggacattttcggacggtaagttttctattaatttataatggactaatcccatgacaaataaaaaacacattttttcaattatctttattggttctcttttaacggggtgtgctacaggaccatcaccgacagggattggcttatatacggatgttaaagggccaattactgccacgagtctcccggcaaccaaaaccggtaaagcgtgtgcgcaaacggtattgggtattgtaaataccggcgacgcatctattgattcagcgaaaaaagcgggcgatatttctttagtgtcgagtgttgattatgaaactacaggttcatatccgttttatggtaaaacctgtgttgtcgtaagaggacaataacaacagtaagccggcgatgccgccggctttttatcccattttacgtgccgctatctctgtctgttccttgcgactcagcccccgctttaaggttctgttaagattttacgcatactctacaagcagttgttaataaaggataataataatggcacatttctcaagactgcaaataacgcttcactggttaacactgctcctgacaggcatcgcatatgctgctattgagttacgggggtgggcgccaaaaggctccagcgtttacctgtttatgaaagacacgcactatgatatgggcgttctggtctgggcgctgatgtttttacggttatatcttaaacacaaatacccggatccggtcattacgcctccccctcctcactggcagcacgtagccgctaaattaatgcatatcgcgctttatctcacttttctcgccttaccgctgctgggcgtcgcgatgatggcatcaggcgggaaaagctggagcttttttggttttactgtaccggtatttttgacgccagatagcgccctaaaatcggatataaagcgtattcatgaaatgctggccaatatcggctatttcctgattgccatgcatgcagcagcggcgttgtttcaccattacatacaaaaagatgatacattttcaaggatgttacccggtaaatcatgactatttcggccatcccggcgtgagagagcacgccgggcaaggcattattattccagcgctatcggtttcgactgatagcgccttacaccgtttgtaatcgacaatatacgatatttttccggttccacgtgtaggtgatatgtacgacgccgccctcgctaataatagcgggataagaatactcaccgtggtcactttccaggtccagtagcggtagccatgattcgccattatcctgggaagcaatcagtgaaagcggatagcgctttccccagttgccgttgaccagatttaacgcaagaatcagcgtaccgtcctgcatactaaccagatcgataccactattattattcggtaaagatgtcgcgcgggcaacagaccaggtagcgccatagtcgattgaatcactgcgaaaaattgccccgcgtgtgcttcgtaacaacatatggatatgccccggagaagactcccacagcgtaggctgaataacgccatcccagcgcaggaggttttccagacaacattcccacaacatccccttttttacaccatcccacaacgctacgtttgtcccggaaatagcgttatcaggctccagcggaacaaaagagatattccagtgttttccttcgtcagaggatcgatccacaaatgccctccaccgttcaggactttcaatcgaccctggcgcaatccaggcgccatttgatgccagcaggagtttattttttacgggaccgcgcggcaaaatatcatcgttaaccaacggagctggcgtactccaggtaaatcctcgatcgctggaggtgataaaccaggttttccacacgtgtacgtcgctgcctactttataaaataaccacaatttatccgacgggtaaaataacaccggattccagtgcgcttccccctcgcgtgccgccactcgctgcggtgttgtccagatattatgttcatagcgagatagccagatggctgtatcttcgcttccttcgcgcaaccccgcgaaccatgcggccacgagcgtaccgcacggtaagcgaacaagcgtagaggcatggcactggaaggactcggttccgctttccggtaaaatgacctgccgattgacgagcactaatttcatacctgcctctattaaataaggtaaaaagcatcagcttttttacgtatgaaagtagtgttagcagaaatagcatcaacgcggtgaaaacgatcaaccgctatacgaatttatattcaggtatcgcgcccataacaggcagaatgtcgagagtggacaaaaattggactgacctcgcggataattccaacttaccgccgtccaatggcgacgaggtcagtggcacgggataatatagaggtcagggctataatatttagcgatctgtgcctacaagcatgacgggatacttttcgctacaggcaatgaaggcccgtctaaacgggccttcattaacgcgattatgatttgtgttcaatcgcctttggtttgctttctatggcaatttttttcggtttctcgctttcagggatctcctggtaaatctcgaccaacaagaggccctgttccagtttcgcattattcaccttagcatgttcaggcaaagaaaaactcaactggaaatccgccttacgaataccacgataaatccagtgcgtctgatcctctaccgtctcttcagtgtgtttacccgtaatattcaggttgccgccaaccgtttcaatttcaagctcttcctctttccagccaggaacgctcacggtaagcagatagttattcgcatcgcgcttttgcagatcgtaagctggcgtcgcagtgactggcgtatctcctgttaattgactgaaaagtctatcaatacggttgaaacggtcagagaaaagagaatcagcaaacacgggaagtgctgacaaggttctgagtgccatcattaacctcctgaatcactattcaaaagttcaacatcaaggcaagcattgcttgtccactgactacatagggacgggaaaaacattttcaagtctataaaagcctttttttagtcacgaatttaagtggttaacgaaaaatctcatcccgttcattgccatttcctctgtcccttcatctttacaatttttctccaccagtacaattgataatgattatcaattgcattaatgtatacaggttggttatggcagtgaccaacgcccttctccattatcaaacccagcgccgccttcgggcggccttttgggaggaaatatggtcgccaaaaataaaattcacggtcgtcgtattcgtcagtctctgcaacagttacatcatcgttgtctttttcagcaactggcggtaagcccaccaggagcaaaatatgtttcagtcaccgctgaaacaaaaaactggcttattcatcttgtgacttcagagggccgttagcacgcggtagtgactgtccatgttgtcgctaaaattttaatgaaatgacatttatacacctacaatttgcgcccggcggctccgggcgccatacctaaagatatgacacccgttgccaactcacaggaattttagctatcgtctccgacgtagaaaaattctatatctttattaaaccatttatcaatgttgtgccacatcagacaaccggtcagaaaacttgcgatcaatatccctcctataagccactttttcacatatactcctgaataacccctgttgatgccattatctgatcgataataaaaagaccatcatttgaagaaatagtttcactgacagataccgtatgaaacgagacagtgaacagtaccgttttcttcggtttttatgccatagtattgagcagtggtgacaatcattttctatcgcaccataatgatttgcagcctatagtttatgattttaagatttgtctactcatcacatatgtcagtgatggataaattataatacgcttttctggcgcacttttcgtcagtaaacaggaatactacagcattcatcgtattgatgccgctttatctcccgttcttcagggaattaacgacaattttatgcacaaaggatactaatgatgaaacgtaaattgatcccatttaccctctttctcgctgcgcttagcgccagtaccacctctatagcagcttcgcaggagatttctaaatctatatacacctgtaatgataaccaggttatggaggtgatttacgtcaacaccgaggctggaaacgcctatgcgattatcagtcaggtaaacgagatgatcccgatgcggttaatgaaaatggcctccggagcaaattacgaagccatagacaaaaattatacttataaactttataccaaaggcaaaacggctgaactggtggaaggtgatgataaacctgttctcagtaactgttccttagctaactaaccttaagaaatgcctgaagactcatcaggcatttccacttcaaccttcctgtaacgtaacgttaaagaatatgtgaatcactaccgtagtataatggctaattagtaaccacttttaagcatggttaatcctatttttaaagaaaagttcgaactgtctgaattgtcgttgttgagcgtttaaatgttttgctttattaagtgacccaggtagaattcgcagcggctggtaaccattcatattcgcactattgaacgatcaccagccaaccgcgccagggtcttgcatacgctctggcgcggttaaatccccaggccataaacgaaatcactggtttctgctattgatcatatctttcaagttaacctgcattatgcttgcccacctgatgtaaaaagacaccgctctgaaccatagggtgtgaatttcattttataaaaaattgcggtgccgggtgcctcccggtgaaccataccacagtcaatatggttcgcgaggaacattaactatttgactggacgccccgccgcaaagggggattcaccgcataagaaaaatctacaactcacaagtaataaaagacaataacatttttgtgcattttttataaatgactatcttgtcacgtaataaatgaaattattctgtaacaggattgcaagacaatacttattcaaaactgaagtggtcagtgggagtcgaacccacatcatcagcctgacactgaggtaataacattatacgataaccacattggaccgccaccgaggcctcgaacctcgcaccatcaacttaggaggttgatgctctatccagctgagctagtggcggctggggacttctgccaggcgcaaaaaaggcgctctcctggataaaatacataccttgctacttttcagtagtcgttcaacggcaggtacaatatgcgaaggcggtcacaaaatcttgatgacattgtgattaattccaggaaaatttttcagagtgaatcttgtgagatcaggcgttatttacaccagattttccttcctgcttatcacctacctgagcaaccttgattgcttaccacaaccccttatctgtgcttatgctggtgagatgttatgtacagcgtcactatgacgaagagagaaaagacaggcaggtacgtgttactggtaaagaagccctgttttgtgactggcggtgcggaaggcgaaccttccgcatagcttatgcttttcagaaacggtatccaaccccgacgttgaagccgtttatttttgtagaggagatgttgcttccttcatacccaacatcgacgacgatattctccagcggattcatctgtacacccgcgccccaggcaaatcccgttttccttgaggaaattttgttagaaaaagaatcgccatcctgagtggaatgttctttaaatgtcgcctttaccgtgccgacacccgccagcgcgtataacgaaaaattgtcagacaatcgataggctggcccaaccattaaagaaccgtacttcacctcaaacttgtcatggtaatgaataccttcaggctcaacagacccggaagcctgtctgtctccatataagtaacttagcgaggaaataaaacttaccggagagtcatcctcataacggtatttcacatttacccctcggatatttttgaaatcctgaactttactttgtgcataccccacggaaaaggcgttagtatcggcctgtgcaacatttacaaccaaaacgcttgtagtaataaataaagtggataaaataatatttttcataacaactccttaatactacttattatttacggtgtgtttaaacacctgcagtaccgatccggcattcagttatcgccactatgccgaatcgacaaaaccacgaataattcaccgctatcgctcctgatgtgtttacttcctgaaagatatttttactaccgaagcactctatcgctcatttaggtaaccggttctacaatgtcatctaacttttatagatttgaatgctaatttttctcacgcatatatatttaacagaaaccataaagtgtttagccactatagaacaacaaacccaccatgcaacattttgatatttaaagagaaaatctcacaaccacattaagaaacctgacaccgatcggctaaaaacatgtcattaagcaaactcgccatataaccagaacatatcgcattgtgcttcacagtcctcacgtgacgctccagccgcaatacggttatatgccatcgcaggcgctgtaatcatattcacgatgatgcttagcacgctttattcccgctccgatttaatcttttaatatatctatcagttacaacatttcttgttatattataagaatagaatcaacaccacaattccaacataaatatcacctgtgtttagagagaatttacattccaaaaaaataataactaacgcaaatattgaacacgcgataaaaaagtctatttcgctataaaacccattattattaagagtggttaactcttcgttgaataaaaaatgtcaatgacgttccataattcaggagatgaacttcacaagtcattatatataacaggaggtgctatgaaacatcatgcttttatgctttggtcattacttattttttcattccatgttttggccagttcaggccattgttctggtttacaacaggcatcatgggatatttttatctacgattttggtagtaaaaccccgcaaccacctacaaatactgataaaaagcaagccaggcagattagttcaccgtcctgcccgacgacaaaacccatgatgtccgcaccagtcaatgacgccaggaaagggaatactttctccagaacataatgttatttatctacaatggtgccgaacgactacttttagccatccggaaatcttgattgccatcaaatatagctggcattatttttcctgacgtgtatagtgcgcctcgttatccccattaaggaatttgtttgtctcgtaaaatgacaggaattgtcaaaacctttgattgtaagagcggtaaaggtctcatcaccccctccgatggacgcaaagatgttcaggtccacatttcagcatgtcgccaacacgaaacagaagcgcttatccccggtatacgcgttgagttttgtcgtattaatggcctccgcggacctaccgccgccaacgtttatctttcataattcgtcacccggcattttttcagaaaaatttagcgagtacgtctacctccgcagcctgctatgaggctttgcctgaaaggctgcagaatgttttcagtggcgaaaatctaaaagatttattttgctaatgactcctgtgacctcttttatcatatatcgggtgccccccccttctcactttgtttaacgtgaagaaatgtacagccgtttttcactgtgatagcatctaatattgcaaaagtatttaacgctatatacccatcgtcacaggagtggctggctgcgcgcatttaaccgaagtatttatgtgattctatcggaattatctctattgccgctcaatgctacgtcatattcagtgggtataaatcgccaatatagttgtaacgctatttatttttagggtaataattgaatgactttgctttcaggaaaaaccacactggttctctgcctctcctctattttatgtggatgtacgacgaacggcttacccacaccttatagtattaatttgtcgttcccggtcattacacaaaaccagattaattccggtggttattacataaatgacgcggaacaaattcggacaactgatggtctgtgccttgatacaggcccagatcaacagaatcgtttgacgctgcgggagtgtaagcatgtgcaatctcagcttttctcatttcaccgagacagaatcacgcagggtgagaaatgtctggatgccgcaggacaaggtacaaaagaaggcacaccaatcattctttattcatgcacgggtaatgataaccagcgctggctcactgatgataacaaaattaaggggaaacagagccgaaaatgcctgggcacaaatagcattattgtcagaaaaggcgaccctgttgtgttggccgattgcgattttagtcgcgccctggaatttaccatcaggtagcaggacaccgctgtgaagagagtgccgctaacctcttgacacgacaacaggttagcgacctttacttccacgtgcgatcaatttactttacgtccgcaacgtcaggatgacaaaacggcggctaaaccttgacaccagttatatacccagcttaaatactggtcatccaaccagtaaaaaggaaatggcgatgttcgtcgaactcgtttatgacaagcgaaatgttgaaggtttgccaggcgcacgcgaaatcatcctcaatgaactcacaaaacgcgtacatcaactttttcccgatgcgcaagtgaaagttaagccaatgcaggcgaacgcattaaacagtgactgtacaaaaaccgagaaagaacggctgcaccgtatgctggaagagatgtttgaagaggctgatatgtggctggtcgccgaataacgtcccctcctgcgaaagcgacatgtccgatcgaaaacagcgccctgaggcgctgtctgtgacgatataacgcaaacgctaccactcagaacatgttgttgttgatacctcagaccggtatgtggaaccgacattcatcgcttcactggcctgtcggtatgagtagcccttatcaacaatcagctgtgcgcattccagcctgaaatctgaaagtacgtttggttttgttgtttattaagagcctatcccattagactcttttattcgccaaactggctttaacgattacgcctactgggataggttctaaacttatcatcaatacgtaaaatacctatttacgaacaaaaagtaacaggtaaaaatccgaaataaaaccagcataactaaaacttactgcagatatgcacacgcattattactatgtttccaagatagtctcgaccagtcaagactatctattttatataaaaaagggaaatacttcacatgaataaaatacatgttacatataaaaatctcttacttccgattaccttcattgcagcaactctaattagcgcctgtgataacgataaagatgccatggcggaagctgaaaaaaatcaagagaaatacatgcaaaaaatccagcaaaaagagcaccagcaatcaatgttcttttacgacaaagccgaaatgcaaaaagctattgccaatatcaacgcaaaaggtggagccaatcttgcgattattgaagtccgtttcttcaagggcgggtattcattcattcgacaaagcgttaacacccctgctaaagtagagatgtttaaatttaacaacggctactgggggggaccttcgcctgtcaacttaaccatctttggcactataacagaggagcaaaaacaagaagcactaaaagaggctttattcaaattcgactcgatcaatttcagcattataccagagcgtattcaggaaacaattaaacgcgctaacgccagtggcatcatttccgttacggaagatagcgatatcgttgtacgagcagagatagctcataatggcgaattcgtctatgacattaccatcactgctaaaaatacagcacgtgcggtaatgaccttaaataaggatggttctattgccggatatgagatcaaagaacctttcgacccaaaaaaataagccgaaaaagcacagcaacttgttgaacaatcgagaaaagacattgaaagtcagcgtaaaaaagcagctgaaaagatgaacgaaatacagcagacatttaaaaaatagcaggcgatacaaacattgataaaaattatagcgcgaaagagcgcgtgccaggtactaaggcactgcttgaagacagcgaatcgctatttcattctctgacactgtaatttttcgtactcaagatgtttatttattgagtcttttgtggataaccaggtgaagttatgtgacgccaggaatctattccagcgggcgtacttgttggagccagtgtgaagccgggcagcgcgcagaaaccggagcgtatacgttgtacgtgagaatttcgagcactgcccgacctaaaaatgatgaataaaatagatattttaaagaggtaatatgaagaattttttcaaaataattactgatttcatcgcggatatttcccttgatctatttgctatatttttatgcatgttattcgtatacaaaacaggaccatcaattggtgtgatatcattttttattgcattaattatttatatcattcttcattttgttttttactcatttcgtgaaaaaatcataaaaaaaatattcaaataagtatttaaaattattgttttgaggtacaaattcagcgcaataaaacagagcaactaaaaaaaaattaggcgtagcgaagtggaaaaggactgtcatgtactggaccgtgagctggtcgggagagcaatgtacgggaaagagcgaaatactgtcattgatatgagcaggaatatcgatagccagtaaatcactcctgtggtaatacaggccacttgatgactgtgaaggtcgcttcatctgaagcgccggtgaagtccagcgatttaagtgaaaagtagccagcaggcgcttctactggtccatattcctctattttgctaggccatactggagcgccacccaggtatctgccagattgatcctaagctaataaatatagcagctactgcctacctcaagaagtatgcgctcatgatcatttaatgctcttttaaagagcctgataataagcttgtcaatataatattatgcagtctctattaagcaccaggtttatttgttttgcataatcatatagttgactttccgagtaagagttttcttgcaaagacaaataaacgtgttttatatctctgaataaacatacatcaccatgaatatgagcttctatataattcccttcatagcctttaccataattagaatgagctaaaaatttttcgcccttagccattttaaccaaactcttaaagcaattataaccaaaaaaatcattttgacaggatgcaatcaggttctccatatgccaaaatgttgatagtttactcgtatccagaccaaatctgtggccgtagatatcaaaaggtgataatgtacaatttgtttttacattatcatttaattcaaaaaatgatttcccataggcgctggcacctccattttcaccgttcagaaagtccagtgcagcataaattggtctgcttgtagggctaaaagttctactgttgggagtatatgctacggaaaaaccgcctgtctgaccatatggggcataaggtgaatctgcaagcctctccagttcaaatgctttagtttcaactgaatcacgtccgacattataagcaggtaaatctcctggtctgcaacctaatgcataagagttcagatattctttattttttaagagagaggcaaagtcaatttttgccgcattaaaatttattgtcagccgggcattttgtaaaatatccaccatcttatttagcaagagagtgcaatctatttcggtaccacactcacggcttatccgcctgagcgctttttctcttattatgtcagcgtctcgctgacacctggaatgaatatgcgcaagtacttgttttccaaaaaggcgaccatacacctttttacgctcttcattgctgagaccgcaaaacacttcgtcaaaagaaagcctgtacgctgcgctcacagaacctctcgccgttctgctttctggaaatggcggaacatcttcaacaacatttctaacttgctgaatgtctgaagacagtggagtacgtccggcatttttttccttatctgtttccagatattccggaacctttatacttccactatggcagataggtttgagcatatgtctcctgaatttttatgactaatatagcattcactttcgctgacgtattctttatcaggctgatatttcaacacttcttagcagccttgtagaaaagcaaataaagcatgctaataattttataaaatacttaacctacccactattgtagtcaataaaccatcactttttattaaaaaattatcctgataataacaataaatctggtaaggcactttcaaaaaatagccaaatcacacattattaagaaaaccactacaatcaaaatcggtaactatcagctttcaggggggtctcaggttatcatgacgatcggggtaaaggatgaactactattgcggtctgaattgagggagttttgataaatttttttgataaagttttgataaccgttcgaatactaataataaaaacggggacgttaagtccccgttttagtttttaacaattatcgttattacatatttgcgataatcgcgtcaccaaactcactacatttcagcagcttagcgccttccatcaggcgttcaaagtcataggtcacggtcttcgcggcaatcgcgccttccatacctttaacaatcaggtctgcggcttcgaaccactgcatgtggcgcagcatcatctccgcagacagaataatggagcctgggttgactttatcctggcccgcatatttcggcgcagtcccgtgagtcgcttcaaacaacgcgcattcgtcgccgatattcgcacccggtgcaataccgataccgccaacctgagccgccagggcatcggaaatatagtcaccgttcaggttcatacaggcgataacgtcgtattccgccggacgcaacaggatttgttgcaggaacgcatcggcgataacgtctttaaccacgatctctttacccgtgttcgggttcttaattttcagccacggaccgccgtcaataagctcaccgccgaactcgtcgcgcgccaactggtagccccagtctttaaacgcgccttcggtgaacttcatgatattgcctttatgtaccagcgtgacggaatcgcgatcgttggtaatagcgtattcaatcgccgcgcgaaccagacgtttagtgccttcttcagaacacggtttgataccgataccgcagtgctccgggaagcgaattttcttcacgcccatctcttcgcgcaggaacttgatcactttctcagcgtctgcagagtcagctttccattcaattccggcgtagatgtcttcagagttttcacggaagatgaccatatcggtcagctccggatgtttcaccggacttggcgtgccctgatagtaacgaacgggacgcagacaaacgtacaggtcaagctcctgacgcagggcaacgttcagagagcggataccgccgccaaccggcgtggtcaatggacctttaatcgctacgcggtagtcacgaattaaatcaagggtttcagcgggaagccagacatcctggccgtaaacctgtgtggatttttctccggtgtaaatttccatccaggaaattttacgctcgcctttataggctttctcgacggcggcatcgactactttaagcatggctggagtgacatcaacaccgataccatcgccttcaataaacgggataatcggattctcaggaacgttgagtttgccgttttgcagggtgatcttcttaccttccaccggaacaactactttgctttccattcacctctccttcgagcgcttctggtttgctcgtctgtcatcgcgctgcatgtgcaatggcgtcctgctgcacgactgcgttagagcaattttttgttaatgttttgtaatgagcatgtcaatactaccctattgtttgccgccatgaaagacactcattattgcgctataatgcggcaattaataagttctgaaaacaccatgcaaaaaacttcttttagaaatcactacgttaagcgattcagctcacgacaagcatctaaatcacggaaagaaaaccagccaaaacgcgtggttttgttcaataaaccttacgatgtgttgccgcagttcacggatgaagcaggtcgccgcacgttaaaagattttattcctgtgcaaggcgtttatgccgcaggccgcctggaccgcgacagcgaagggcttttggtgctgactaatgacggcgcgctgcaggcgcgcctcacgcaaccgggcaaacgcaccggcaagatttactatgttcaggtagaaggtatcccggataatgcagcgctgcaggcgcttcgtactggcgtcacgctcaacgatggccctaccctgcccgccggtattgagattgtcgcggagcctgactggctgtggccgcgcaccccgccgattcgcgaacggaagaatattcccaccagttggctaaaagtcaccttatatgaaggccgcaaccgccaggtaagacgcatgacagcgcatgtcggtcatcccactctacgattaattcgttacagcatgggcgactacacgctcaacggcctcgataatggacagtggcgcgagatcgcacaggagaaagacagatgaaacggcttctcattgcttttgctttattaacaccgttatccgtcgatgcggccagcttcgactgccagaaagcgcaggctgcggatgaaaaggctatctgcgcgcacctgacgctgaatgataaaaacgtggaaatgcacaccaaatatcagtttctgaaagggttgttcgcgatgggcagtcgcggcgcgctgcaggacgcccagcagagctggcttaaacagcgtcagcagtgcaaggccgatgtcacctgcctgacaaaagcttataacgagcgtctgaaacagcttgacgcgatctatgaccacattgataaaccgctttaataaggatgcctatgttcaagccgcacgtgaccgttgcctgcatcgtacatgccgaagataaatttctggtggtggaagagaccatcaacggtaaatcgttatggaatcaacctgccggacacctggaggcagatgaaacgctggcgcaggccgccgcgcgtgaactgtgggaagagactggcatcacggcgcaaccacagtattttatccgtatgcatcagtggattgcgccggataagaccccgttcctgcgctttttattcgctatcaagcttgatcatatttgcgcgaccgaaccccatgacaatgacatcgattgctgccgttgggtgagcgccgacgagattctgaacgcgccgaatttacgttctccgctggtggctgaaagcattcgcagttatcaaacgggacaatgttaccccttatctatagtgggcgaatttaactggccgtttacagagggtgtcaagtaaagggctgcgtggtagaatacgccgccttgaagttcaatgtcgcgagtattccaatgtcagaaagcccaaaaaaagtgatcgtcggcatgtccggcggtgtcgactcctccgtttccgcctggctgttgcaacaacagggttatcaggtagaaggcctgttcatgaagaactgggaagaggacgatggtgaggaatactgtaccgcggcagccgatctggctgacgcgcaggccgtgtgcgacaagcttggcattgaactgcataccgttaattttgccgcagaatattgggataacgtctttgaactgttccttgaagagtacaaagcgggccgtacgccgaacccggatattctgtgcaataaagagatcaaatttaaagccttccttgaatttgccgcagaagatttaggcgccgactatatcgccaccggtcactacgttcgccgcgcggatgtaaacggcaaaagccggttgttgcgcgggctcgacggcaacaaagatcagagctacttcctctatacgcttggccatgagcagattgcgcaaagtctgttcccggttggcgagctggaaaaaccgcaggtgcgtaaaatcgccgaagatctggggctggtaaccgccaagaaaaaagattctaccggtatctgctttatcggcgagcgcaaattccgcgactttttagggcgctatctgcctgcgcagccggggaaaatcattaccgttgacggcgatgaaatcggcgagcatcagggtctgatgtatcatacgctcggtcagcgtaaagggctgggaatcggcggcaccaaagacggtagcgaagacccctggtatgtggtggataaagacgttgaaaacaatgtgttaattgtcgcccaggggcatgagcacccacgtctgatgtcggtaggcctcatcgcccagcagctacattgggtcgatcgcgaaccgttcaccggcaccctgcgctgtacggtaaaaacccgctaccgccagaccgatattccgtgcacgattaacgcgctggatgacgatcgtatcgaggtcatttttgacgagccggttgccgccgttacgccgggccagtccgctgtcttttacagcggcgaagtctgcctgggcggcggcattatcgagcagcgactgccgctgacggtctgattattcaatacacaacaccattcaagtcgcctcaaagcggcttaaaagatgaagtgtattttatttgatacaaggaagcagtgattgtggcaaagaattattatgacatcaccctcgcgctgtctggcatttgccagtcggcacgcctggtgcaacaactggcgcaccaggggcactgtgatgccgacgcgttgcacgtttcactcaacagtgtcattgatatgaatcccagttctactctgggcgtgttcggcggcagcgaagctaacctgcgtcttggtctggaaacactgctcggcgtgctgaatgccagcagccgacaaggacttaacgccgaactgacgcgttatacgcttagcctgatggtgctggagcgcaagctgtcatccgccaaaggcgcgttgaatacgttaggcgatcgcattaacggcctgcagcgccagcttgaccattttgatttacagtcagacacgttaatgagcgccatggcgggcatctacgtggatgtgattagcccattgggcccgcgcattcaggtgacgggctccccggccgttctgcaaagtccgcaggtgcaggccaaagtccgcgcctcgctactggcaggcatccgtgcagccgtgctctggcatcaggtaggcggtggtcgcctacagcttatgttttctcgtcatcgcctgacgactcaggcaaaacaaattcttgctcatttaaccccggagttatgatctatggaattatcctcactgaccgccgtttcccctgtcgatggacgctacggcgataaagtcagcgcgctgcgcggaatttttagcgaatacggtttgctgaaatttcgtgtacaagtcgaagtacgttggctgcagaaattagccgcgcacgcagcgatcaaggaagttcctgcttttgctgccgacgcaaacggttacctggatacgcttgttgcaaacttcaatgaagaagatgccgcgcgcattaaaaccattgagcgcaccacgaatcacgatgtgaaagcggttgagtattttctgaaagaaaaagtcgccgcgatcccggcgctacatgacgtttccgaatttatccactttgcctgcacttctgaggacattaacaacctgtcgcacgcgttaatgctcaaaaccgcgcgcgatgaagtgatcctgccttactggcgtcagatgattaacgcggttaaagatctcgccacgcagtatcgcgacattcctctgctctcccgcacccacggccagccggcaacgccttccactctgggtaaagagatggcgaacgtggcgtatcggatggagcgtcagttccgccagctcaaccaggtggagatcctcggtaaaattaacggcgccgtaggcaactataacgcgcatatcgccgcctatccggaagttgactggcatcagttcagcgaagagttcgtcacctcgctgggcatccagtggaatccttacaccacccagattgaaccgcatgattatattgcggaactgtttgactgtatcgcgcgctttaacaccatcctgatcgatttcgatcgcgatgtctggggctatattgcgttgaaccatttcaaacagaaaaccatcgccggggagatcggttcttctaccatgccgcataaagttaaccccattgactttgaaaactcagaaggcaacctcggtctgtctaacgcagtgttgcaccatctggcaaacaaactgccggtttcccgctggcagcgcgatctgaccgactcaaccgtcctgcgtaacctgggtgtcggcatcggctatgcgcttatcgcttatcagtccaccctgaagggcgtcagcaagctggaagtaaaccgcgatcatctgcttgacgaactggatcacaactgggaagtattagccgaaccgatccagaccgtcatgcgccgctatggtattgaaaaaccatatgaaaaactgaaagagttgacccgtggcaagcgtgttgatgccgaaggaatgaaacagtttattgatagtctggccctgccggaagcagaaaaaacgcgccttaaagccatgacgccggcaaattatatcggtcgcgctgtgactctggtcgacgaacttaaataatgcctgcctcaccctcttttcttcagaaagagggtgactatttgtctggtttattaactgtttatccccaaagcaccataatcaacgctagactgttcttattgttaacacaagggagaagagatgatgcgcgtactggttgtagaggataatgcattattacgccaccacctgaaggttcagctccaggattcaggtcaccaggtcgatgccgcagaagatgccagggaagctgattactaccttaatgaacaccttccggatatcgctattgtcgatttaggtctgccggatgaagacggcctttccttgatacgccgctggcgcagcagtgatgtttcactgccggttctggtgttaaccgcgcgcgaaggctggcaggataaagtcgaggttctcagctccggggccgatgactacgtgacgaagccattccacatcgaagaggtaatggcgcgtatgcaggcgttaatgcgccgtaatagcggtctggcctcccaagtgatcaacatcccgccgttccaggtggatctctcacgccgggaattatccgtcaatgaagaggtcatcaaactcacggcgttcgaatacaccattatggaaacacttatccgtaacaacggtaaagtggtcagcaaggattcgctgatgcttcagctgtatccggatgcggaactgcgggaaagtcataccattgatgttctcatggggcgtctgcggaaaaaaatacaggcccagtatccgcacgatgtcattaccaccgtacgcggacaaggatatctttttgaattgcgctaatgaataaatttgctcgccattttctgccgctgtcgctgcgggttcgttttttgctggcgacagccggcgtcgtgctggtgctttctctggcatatggcatagtggcgctggtcggctatagcgtaagttttgataaaaccacctttcgtttgctgcgcggcgaaagcaacctgttttataccctcgccaaatgggaaaataataaaatcagcgttgagctgcctgaaaatctggacatgcaaagcccgaccatgacgctgatttacgatgaaacgggcaaattattatggacgcagcgcaatatcccctggctgattaaaagcattcaaccggaatggttaaaaacgaacggcttccatgaaattgaaaccaacgtagacgccaccagcacgctgttgagcgaggaccattccgcgcaggaaaaactcaaagaagtacgtgaagatgacgatgatgcggagatgacccactcggtagcggtaaatatttatcctgccacggcgcggatgccgcagttaaccatcgtggtggtcgataccattccgatagaactaaaacgctcctatatggtgtggagctggttcgtatacgtgctggccgccaatttactgttagtcattcctttactgtggatcgccgcctggtggagcttacgccctatcgaggcgctggcacgggaagtccgcgagcttgaagatcatcaccgcgaaatgctcaatccggagacgacgcgtgaactgaccagccttgtgcgcaaccttaatcaactgctcaaaagcgagcgtgaacgttataacaaataccgcacgaccctgaccgacctgacacacagtttaaaaacgccgctcgcggttttgcagagtacattacgctctttacgcaacgaaaagatgagcgtcagcaaagctgaaccggtgatgctggaacagatcagccggatttcccagcagatcggctattatctgcatcgcgccagtatgcgcggtagcggcgtgttgttaagccgcgaactgcatcccgtcgcgccgttgttagataacctgatctccgcgctaaataaagtttatcagcgtaaaggggtgaatatcagtatggatatttcaccagagatcagttttgtcggcgagcaaaacgactttgtcgaagtaatgggcaacgtactggacaacgcttgtaaatattgtctggagtttgtcgagatttcggctcgccagaccgacgatcatttgcatattttcgtcgaagatgatggcccaggcattccccacagtaaacgttccctggtgtttgatcgcggtcagcgcgccgataccctacgaccaggacaaggcgtggggctggctgtcgcgcgcgagattacggaacaatacgccgggcagatcattgccagcgacagtctgctcggcggtgcccgtatggaggtcgtttttggccgacagcatcccacacagaaagaggaataaacatttctgtgcgttcttccacgcatctcgttaagcatccgttataatcggtgtcagataccagcctgcggatacttaacatggaataccaattaactcttaactggcccgactttcttgaacgccactggcaaaaacgcccggtggtcttaaaacgtgggtttagcaactttatcgatccgctctcgccggatgagctggcggggctggcgatggaaagcgaaatcgacagccgactcgttagccatcaggatggcaaatggcaggtcagccatggccctttcgaaagctacgatcatctgggtgagagcaattggtcgctgctggtacaggcggtaaaccactggcacgaacccaccgccgcgctgatgcgcccgttccgcgctctgccggactggcgtatcgacgatctgatgatctccttttccgttcccggcggcggcgttggcccgcatctggatcagtatgatgtgtttattattcagggaaccggtcgccgtcgctggcgcgtgggcgaaaagctgcaaatgcgtcagcactgcccgcatcccgacctgttacaagtcgatccgttcgaggccattattgatgaagagctggagccgggcgacattctgtatattccgccaggattcccgcatgaaggctatgcgctggaaaacgccatgaactattcggtcggttttcgcgcgcccaatagccgtgagctgatcagcggttttgccgattacgtcctgcaacgggagttgggcaatacatactacagcgatccggatatgccgtcccgcaagcatccggcggatatcctgccgcaggagatggataaactgcgtaatatgatgctcgatttgatcaatcaacccgcgcatttccaacagtggcttggcgagtttctctctcagtcacgccacgaactggatattgcgccgccggagccgccgtatcagcctgatgaaatttacgatgccttaaagcaaggcgaggtattagtacgtctcggcgggcttcgcgtgttgcgtatcggcgatgaggtctatgcgaatggcgaaaaaatagactctccgcatcgccccgctctggaggcgctcgccagtcatattgcactgaccgctgaaaacttcggcgatgcgctggaagacccgtccttcctcgcgatgctggcggcgctggtgaatagcggatactggtttttcgaaggataagaacatcgcaatgcccggcgaccgccgggctgacgcaaactatccacaacgatcgccgccaggtttggcgaaatcgttatattgcggatcgcccggataaatcgagtgggccattcgatggcgaaatgacaattgtcggtaacgtcgcgccagtacgttatcgccaagaccttcggcaatattagccagtcgctgtaatcgttcatactgcatctttgctggataagctacggcatcaagcgtaaaggcgcgttccgcaaagtcttttgcttgttcaagctgttgattattctgataaagcagcgaaataccatacaacaccatggatacgtcggactgccgacgtttatattcttccagcaatgggagatagggggaggtactgtccaggtcgatgttttcgggcaaataaaagcgtaatcgtgatattaccgtcgccattggcgttaaacggctctggtaatacgcgataagtttaaggtagagatctttcgcttccttataatgatggccctgtgcataaaagccagcaagattattgctgtcaaccgtcatttcgccgaattcggcgccataaagcgtttgctcaatttttagcgcctgacttagcgcattaatcgcctcgctaatatgccctgcattataagcaatatccgctttctgctgcaaaaaagaggcgacgcgctcacgattatcccaggttttatctcgtaaaataacgctcagccactgccgctccgttgtgtctatcttcgccaaataataggctttacgcgcactatcacattcgacatcccgctcttccagcgcatcagaataagcgtcgcgcatcctgtttaaggtataaaccaatgcctccgtcgatgcctttttgtctttaagacgccacgttaatgcctgctcttgccaggctattcgctgacggtaatcaaccttaatctcgtatcgccactgctctgtagatgaatactctatatggcgatcgtcactgtaaacataaaaggccgccaggtgttcaaacatatcggcccgatcgcccggataagtgcccgccggaaatgttttcattattgcccgcgctcgcagcagcatttgcggcgttaattcaggtttacccagccattgataaatatcgctttgtaatagcaggctacgaacaagctgtattgagcgtttgccatattgctgcgaggccagcctcaccgcatcatcaataaacgtcatgcaggtttcatcgccggtcataaaacatgctgcagattgttgctggcgctgggaccaggaaggcgtatattcggcgctccaggcagaaaaattgatggcggaaaatatcccgccataaataataaaacgcttcaccacaatgcgtaacattcgctactggccgcgcttcgccgtcagctccgcgatacgtacaatcacctgtaccgctttttccatcccctccagcgtcacaaactcatgtttaccatgatagttatatccgccggtaaagagattaggacacggcaggcccataaacgacagttgcgccccgtctgtaccgccgcgaattggtttcatctccggcgtaatatgacagtcacgcatggcctgctgggcgatatcgagaatatgcggatgctcaaccactttttcgcgcatattgtaataactgtcttcaatcaccagttcgatatagcagtccggatgcagccccttaccgacttttttggcaatctccatcattttgcgtttacgcgcttcaaactgcttacggtcgaaatcgcgaatgatgtagtgcatttcggcccggtcaacggtgcctttcatgctggccagatgataaaacccttcgtaaccttcagtggtttcaggcgtttcatccgccggcacttccgcgtgaatcctcgccgccaacgacagcgcattgaccatcacgccttttgccgtaccgggatgcacgttattgccgacgattttgatattcaccgaggcggcattgaagttttcaaactccagttcgcccacgccgccgccgtcgaccgtataggcccactgcgcgccaaaggcctcaacatcgaagtgcttcgcgcctttccctacctcttcgtcaggcgtaaacgccactttaatttcaccgtggggaataggattacctttcagcaccgccagcgcggtcatgatctccgcaacgccggctttatcgtccgcgcccagcaatgtcttaccatcggtagtaatcagcgtctgtcccagtaattgatgcagtaccgggaacatcacgggtgacaacacctcatcgccaatccctaatgctatatcgccgccgcgataattctcgacaatctgcgggttaacgtttttaccgctgaaatccggagaggtatccacatgggagataaaaccaatggcgggaatatccccctcaacattggccgggagcgtcgccatcaacgtccctttttcacttaatgtaatgttaaccagccccatctcttcgagctgctgtttgagcaaacgtagtaacttccactgcccctcagtgctgggaacctgccgaacacccgactttgattgggtatccagcgatacgtagtgtaaaaaacgctcaagtagtttatccatgcagtcaccctcacttttcgtgacaacattattaataagcaagaaaagacaaatattgcgtcaggtcacttttatccctgcaaacaagaatatttcactttgacacgctttctgactataaagctaagtcagtaattcgcaacaaggattggcgatcacagtggtttgccgtagaatgaccgccctcattaagagtgattaaggtggttaaccacaaaccccgcagcggtcagccatccgttgcgtttacatgggacagagtaagaaattgaataatcaaccgcgttcgctttcaccgctggtgcttttgtctggaattagcaaaagtttcgatggcaaagaggtcatttcgcaactggatttgaccattaacaatggcgaattcctcacgctgcttggcccttccggctgcggtaaaacaaccgttcttcgcctgattgccggcctggaaaccgttgatgccgggcatatcatgttggataaccaggatatcacccacgttcccgccgaaaatcgttatgtaaataccgtatttcaaagctacgctttatttccgcatatgacggtgtttgaaaatgtcgcgtttggcttacgaatgcaaaaaacgccagccgccgagatagcgcctcgcgtgaccgatgcgctgcgtatggtgcagcttgaagagtttgcacaacgtaaaccgcaccagctttccggcggacagcagcagcgtgtggctatcgctcgcgcggtggtgaataaacctcgcctgttattactggatgaatcgctttccgcgctggactataaattgcgcaaacaaatgcagaacgagcttaaagcattacagcgtaaactcggtatcacgtttgtttttgtcactcacgatcaggaagaagcgctcaccatgtccgatcgtatcgtggtaatgcgtaatggcgtgattgagcaagacggcacgccgcgtgaaatctatgaagagccaaaaaacctgtttgtcgccggttttatcggcgaaattaaccgctttgacgcaaccgtcattgaacggcttgatgaacagcgcgtccgcgccagcgtagaaggtcgggagtgcaatatatacgtcaatttcgctgtcgaaccgggccaaaaactgaacgtcctgctgcgaccggaagatctacgcgtcgaagagatcaacgatgataaccacatcgaagggcttatcggctacgtgcgcgagcgcaattataaaggtatgacgctggagtcggtggttgaactggaaaatggcaaaatggtgatggtcagcgaattcttcaacgaagacgatcctgacttcgaccattcacttgaccaaaaaatggccattagttgggtagaaagctgggaggtcgtactggctgatgaagaacacaagtaaattccagaatgtagtgattgtcactatcgtcggttggcttgtgttatttgtttttctgcccaacctgatgatcattggcaccagctttctgacccgtgacgacgccagtttcgtcaagatggtctttacgctggataattacgcgcgcctgctcgatccgctctattttgaagtgctcctgcactctctgaatatggcgctgatcgccaccctctcctgcctggtgctgggctatccttttgcctggtttctggcgaagttaccggaaaagatacgtccgttattgctgtttttgctgattgttcctttctggaccaactcactgatccgcatctatgggctgaaaatattcctgagcactaaaggttatctcaatgaattcctgctgtggctgggcgtgattgatacaccgattcgcatcatgttcaccccgagcgccgttattatcggcctggtttacattttgctgccatttatggtcatgccgctctactccagcattgagaagctcgacaaaccactactggaggccgcacgcgatctcggcgccagtaaaatgcaaacgttcatccgcatcattattccattaaccatgccgggcattgtcgccggttgcttgctcgtgatgctaccggcaatgggcctgttctacgtctccgatttaatgggtggcgcgaaaaacctgctgattggtaacgtcattaaggtacagttcctgaatattcgcgactggccgtttggcgcggctaccagcattacgctgaccattgtgatgggactcatgctattgatttactggcgggcttcccgcttattgaataagaaggtgagtgatataagcgattaattgcgcaacgctaacaaatccacacgcatccaggcatgaagtttattcaagggtaaacttcatgcctccggcataaaaaacgcatgaaagcagttgccgccagtattgcaaatctacaacatcatccgcgccaggccttcttttatttttacctgtagcgacgctatcacagacagtaatgcgtttatacgcgaagctctcaggttttatactgattgtcagtctcttttaaaaattatattacatccgatgcgcccgcagttgagataaaaagggtcgatttaatcaattatgtagtcatttttactccagtttaagtgagattaatatgccgattactatagggaatggttttttaaaaagtgaaatccttaccaactccccaaggaatacgaaagaagcatggtggaaagttttatgggaaaaaattaaagacttctttttttctactggcaaagcaaaagcggaccgttgtctacatgagatgttgtttgccgaacgcgcccccacacgagagcggcttacagagattttttttgagttgaaagagttagcctgcgcatcgcaaagagatagatttcaggttcataatcctcatgaaaatgatgccaccattattcttcgcatcatggatcaaaacgaagagaacgaattgttacgtatcactcaaaataccgatacctttagctgtgaagtcatggggaatctttattttttaatgaaagatcgcccggatattttaaaatcgcatccacaaatgacggccatgattaagagaagatatagcgaaatcgtagactaccccctcccttcgacattatgtctcaatcctgctggcgcgccgatattatcggttccattagacaacatagaggggtatttatatactgaattgagaaaaggacatttagatgggtggaaagcgcaagaaaaggcaacctacctggcagcgaaaattcagtctgggattgaaaagacaacgcgcattttacaccatgcgaatatatccgaaagtactcagcaaaacgcatttttagaaacaatggcgatgtgtggattaaaacagcttgaaataccaccaccgcatacccacatacctattgaaaaaatggtaaaagaggttttactagcggataagacgtttcaggcgttcctcgtaacggatcccagcaccagccaaagtatgttagctgagataatcgaaaccatctctgatcaggtttttcacgccatttttagaatagacccccaggctatacaaaaaatggcggaagaacagttaaccacgctacacgttcgctcagaacaacaaagcggctgtttatgttgttttttataaaatcagacgacgctttctcaaacgtcacgttcagggtttactcacgtactccatgtttgcctacagagtaacctcttgcctggtgcaataatgccgcatatgaccggatcggatgagaatagtcatttaaatggcctttttttcccgctcgtctggcaatttgttgtaaaattcgcggcttcaagcggcagcttgcttcttcctggctgctgataaccgcgagacgttttggagagattttggagaagagaaaaaattgatcattttcaatactctaaaagcaccccatcctctgaataagaaggtggaacttgaatgatcggtcggctgctccgtggcggtttcatgactgccatctatgcgtatctgtatattcccatcattattctgatcgtgaactccttcaacagttcgcggttcggcattaactggcagggctttaccactaaatggtacgaactcctggtcaataacgacagtctgttgcaggccgctcaacattcactgacgatggcgattttttcagcgaccttcgccacgttgattggctcgttaaccgcggtggcgctttatcgctaccgctttcgcgggaagccattcgtcagcgggatgctgtttgtagtaatgatgtcgccggatatcgtgatggcgatctccctgctggtgctgtttatgttactcggcattcaactgggcttttggtcgttgctgttctcgcacatcacctttagcctgccgtttgtggtcgtcacggtctattcgcgcctgaaaggctttgatgtcagaatgctggaagccgcaaaagacctgggggccagtgaggtaacgattttacgcaaaatcattctgccgctggcgatgccggcggtggcggcgggctggttgctgagctttacgttgtcgatggacgatgtagtggtctcgtcgtttgtcaccgggccgggctatgaaattttacccttaaagatttattccatggtaaaagtcggcgtttcaccagaagtgaacgcgctggcgaccgttttattggtgctgtctctggtaatggtcattgccagccagcttattgctcgtgataaaaccaagggccgataaggcccgtaattcaggggacgttaaatgaaaaaatggtcacgccacctgctcgcggcgggcgccctggcgctgggtatgagtgccgctcatgcctccgacaacgacacgctctatttctataactggactgagtatgtaccgccgggcctgctggaacagttcactaaagagacaggcattaaggtgatttattcgacctacgagtcgaacgaaaccatgtatgccaaactcaaaacctataaagatggcgcgtatgacctggttgttccttctacatactatgtcgacaaaatgcgcaaagaaggcatgatccagaagatcgataagtcgaaattaaccaatttccacaacctcgatccggaaatgctcaacaaaccgtttgaccccaacaacgattattctgttccgtatatctggggcgcaacggcgattggcgtgaacagcgatgctatcgatccaaaaaccattaccagctgggctgacttgtggaaaccggaatataaaaacagcctgcttttaaccgacgatgcgcgagaagtcttccagatggcgctgcgcaagctaggttattccggtaacactaccgatccgaaagagatcgaagcggcatatgaagagttgaaaaaactgatgccgaacgtagcggccttcaactccgataatccggcgaatccgtatatggaaggggaagtcaatctggggatggtgtggaacggttcggccttcgttgctcgtcaggctggcacgccgctggaggtcgtctggccgaaagaaggcggtattttctggatggatagcctggctattccggcaaacgcgaaaaataaagagggcgcgctgaagctaatcaacttcctgctgcgtcctgacgtcgcgaaagaggtggcagaaaccatcggctaccctacccccaacctggcggcgcgtaagctgttaagcccggaggtcgccaatgataagtcgctctatccggatgcgcaaaccatcagcaaaggcgagtggcaaaacgatgtcggcgacgccagcgccatttatgaagagtattatcagaagctaaaagcaggacgctaattcagccaaagcgcctgtcgggcctacagatgaacgtaacgtgaaatgtaggccggataaggcgttaccgggcaaacagcactacagccctttcaggaatttatcaacaaattccggcacaacctggcttgccgggccgtagtgcttctcttcaaactcgctgccgacctggcttggctcaagattcagttccaccgtatgtgcgccgtgcagttttgcttcatgcacaaaccccgcagccggatagacatgaccggatgtgccaatggcgataaaaatatccgccatcgacagcgccatataaatttcatccatgccaagcggcatctcgccaaaccacaccacgtgcggacgtagcggcgccgggaactggcagcagtgacatttatcttccggcatcacatcgccgttccattccagaatttggccgctttgcgaacagcgcaccttcaacagctcgccatgcatatgaatgatgttgcgattgcccgcgcgttcatgcaaattgtcgatgttttgcgtcaccagcaaaaagcgatcgccaagcgcttcttcaagcttcgctaacgccagatgcgccgcattgggttgtatttccggctgttgaagctgctgacggcgggcattataaaatgtctgcaccagccccggattacgggcgaatccttccggcgttgccacgtcttcaacccgatgctcttcccaaaggccatccgccgcgcgaaacgtacgaataccagactctgcagaaattcctgcacctgtaaggactaatactcttgggttttccatcatttccggcaccactctgtctctgaaaaagatccgctggcgcagacgttcacgcaacagacgtttatttttacgaaagcggcttaatcgatgaaaccgacgcgactgcataacaacctctttttttgattagtcggtaagatgtaaaaaagcagcaccgcgcatcccacctgcatccccatgccgcgcacgctcaatgcgcggcgcgcgggcaacagggaggagatggcgcggcagtctttccgccagttgcgttgttattgccgtaaagttcgatagtccgccgccgatcaccaataaatcgggatcgacaatcgtcagtatattccccagacaaaccgccagtaaatccagatagcgctcaacatgcgcgtgcgcctgctcatcgccctgctcccacaacgcgataatctccggcgcctgcagcgattgatcataataatgctgatatagccacgcaaacccgcgcccggacagataattctcaatgcagcccatctgaccgcatccacaacggcggagaggaaaatcaaaccccatcaacgttagcgcgtcaaccggcaaacgcatatgaccaaactcgccggtgatatagctctgaccggtaatcggcttcccgtttagcaccaggccaccgccgacgccggtgccgaggataagccccataaccaaaggatattgcgtgaattcatcatcccaggcttcggacaaggcaaaacagttagcgtcattgtccagacgcacatcgcgatccagtcgggcgctgagatcggcgcgcaacggcttaccgctggctgccgggacattcgcggcgtacagcgtgccgtcttcggtttccggcataccgggtatgccaatccctaccgacccttttacgccaaatcgctggtcggcttccgcgaccagttcgcatacggcgtctaaaaaggcgctatagctggtatggggcgtgggaacccgtttttcccactgcagccgccgcgttgagtcaaatacgcctaacgcaatctttgttccgccaatgtcaaacccgtaatacatcaccgctccttgtttttatattccgcgattactgcccgctcaatactcgcgcagggtcaatgttgctcgcccgccgcgccggataccagctcgccagtaagcttaacaacaacgccgtgaccagtacgtaaacaacgtccagccaatgtaattcggatggcaggaagtcgataaaatagatatcgccggacaaaaactgatgcccgatctccttttcaatcccattaataatggcggtaagctgaagcgaaacgacaacgccgatcgccacgccaatcaagctgcccagcaagcccgccagtagcccgtaccagacgaaaatggcacgaatcaaaccatctttcgcccccagcgttcttaataccgcaatgtcgccgcttttgtcttttaccgccatcactaaggtggaaacgatattaaaacaggccacgccgatcaccagaatcatcgccagatacataatggcgcgaatcatctggatatcgcgatacatatagccgtaggtgccgatccagctcttaatgtagacatagctgttagtcacttcacccgcgtcacgcaccagtttgttcgcattaaacacgtcgtggactttaagcgcgataccggaaacgctggaccccatatccagatactgctgcgcatcctcaagcgggatcatggcgaagctgtgatcgagctggccgctcagttgcagaatcccgatgacatgcaaacgcacgcgtttgggctggagcagcttatggtcggcattcgcattggggatcatgatggacacccagtcgccctgtttcacgttcagcgcatcggcgacgcctttgccgataatgatctgctgttcgcccgctttgaaatgatcccaggcgtgattttgcacaaatgacggtaacgcgctaagctgctgctcttgcttagggtcgacgcctttaacctgaatggcgcgcaaattcgccccgctctctaccaggccggtaaaattgatatacggcgcggcggcggcaatgcccggcaccttctgcacttttgccagcgcttcacgccagttggtccacggctgattgaccgcttcaatctccccgtgcggaaccaccgccagaatacggttattcaactcgcgttcgaaaccgttcatcgcgcttaaaccgacaatcaataccgccacgcccagcgcgataccgatggtagaaatgacggaaatgagcgaaaccataccgccgcgccgccgcccacggctgaagcgcaagccaattaacaatgataaaggcgacgccattactccgcccccatcaggctcagttccgccgtcaggcggccatcgcgcatctcaagctggcggctcatacgtttcgccagttgcaaatcgtgagtcaccaccagaaacgcggttccctgcagacgatttaactcgcccagaagctcaaaaatactgtcggcattacgcgcatccagattaccggtcggctcatccgccagtaccagacgcgggttattcaccaacgcgcgcgctatcgcgacacgctggcgctcaccgccggaaagttccgaaggtcgatgggttgcgcgatgctccagccctacggcgtgcagcatttctcgcgcccgagcgtcaatctccgccggtttctttttgccaatcaataatggcatcgccacgttttccagcgccgtaaaatccggcaggagatgatgaaactgatagataaaccccagtttctggttacgtaattccgcttttgccgcagaagagagtttgctcatcggctggccgctaaaaatcacatcgccggaggtgggcgtatccagcccgcctaacagatgcagcaacgtacttttacccgaaccggaactgccgacgatcgccatcatttcgccttcgccgatactgaagctgacatcgtgcaacacgtcggtttgtacggtgccttcctgatagcgtttgcacaggttgtcgcattgcaacaggatcttattcataacgtaaagcctcagcgggttgagtggcggcagcgcgccaggaaggataaagcgtagaaagcagcgcgatggccattgccaccagagcgataacgatcacctgtaacggctctatcgccacgggcaacgcagcgccatccagaaacgcgccgatgatcggcatcaggttattcagttggctggcaagcaatgcgcccagcgcggcgcccaacagcgcgccgataatcccggcgctggcgccctgcaccataaagaccatcataatttgtcgcggcgtcagcccttgagtttgtaaaatcgccacttcgccctgcttctccatgaccatcaggcccaacgaagtaataatgttaaaagccgcgactgccacgatgagactcagcaacaatcccatcatgttcttttccatgcgcacagcctggaacaactcgcctttgcgttcgcgccagtcctgccacttcgtgccttgcggcagcgtctgttgactgagggtatcgacttgcagcggttcatccagccacagacgccagccggtaatattgcctgccggatagcgcattaaacgcgacgcgtcctgaatattgaccagcatttcatagccatcgacctcgctattggcggcaaatgtgccaatcaccgtaaacagacgctggctgggcaggcgtcccattggcgtaaactggctggcagatggcaccattagccgaatctgatcgccacggttgacccctaactgtccggcgagctgctcgccgaggatgacattatacttacccggctgtaattcgctttgcttcacattgaccagatacggcgttaacggatctttttgcgccggatcgatacccaacatcacgccaaccgcaacgctacgcgcgctttgcagtacgacatcgcccgtcgtcagcggcgcaatacggttaacgccttgcagattcaccgctttttccggcatctgactcgggttaagagaaccatgttcagcagagaggatggcctgaggcatcaaaccaagaatgttattttgcagttcgcgctcaaaaccgttcatcaccgacaataccgtgaccagcgccatcacccccagggtaatgccgatagtggaaagccaggaaacgaagcgaccgaagcgatctgctgcacgcccgcgcatgtaacgcaggccgatgaatagagcgacaggttgatacatgtaatccgtctggttgctgttagcaaagtcccgagtatataagcgaaagcggaatgcgtaaatgtctgaaccgtaagagttcgtcagcgttattctgaaaaaggccgacaaatcaagtcacttacatgttcatactttacctgttcggcgcgttatccggcggattcaatttgctaataaacaacgatcgcggataataaagaacattgcttatcagtcatatgcccctgaatacctgagtccttcatgctgtcccggcgcgcagccaaccatgaagcagcctgaagggtgacgcgtagagtgcggcgtaaaacaaaaagagatactgacaaccgttatgcctgaaaaacaacgttacacgctgccgacaaaagcgggcgatcagcgccagttgggcgaacttaccggtgccgcctgcgctacgctggtggcggagatagccgaacgccatgccggtccggtggtactcatagcgcctgacatgcaaaatgctctgcgattgcatgatgaaatccgccagtttaccgatcagatggtgatgaacctggcggactgggaaacgctaccgtatgacagcttctccccgcatcaggaaattatctcttcgcgcctgtccacgctctaccagttgccgtcgatgcagcgcggcgtcttgattgtaccggtaaacaccctgatgcagcgcgtttgtccgcatagctatctgcatggtcatgcgctggtgatgaaaaaaggccagcggctgtcccgcgacgctctgcgcgcgcagcttgacagcgccggttatcggcatgtcgatcaggtgatggagcatggcgaatacgcgacgcgcggcgcgctgttggatctctttccgatgggcagcgaacagccttatcgcctcgacttttttgatgatgaaatcgacagcctgcgtctgtttgacgcggatacccagcgtacgctggaggaggtcgaggccatcaatttgttgcccgcgcacgaatttcctaccgacaaagccgctattgagcttttccgtagccagtggcgcgatacctttgaggtaaaacgcgacgccgaacacatctatcagcaggtcagcaaaggcaccttgcccgccgggatcgaatactggcagccgctctttttcagcgaaccgttaccgccattatttagctatttccccgccaatactctggtggtgaatactggctcgctggaaaccagcgccgaacgctttcaggccgatacgctggcgcgttttgaaaatcgcggcgtcgatcctatgcgcccgcttttgccgccggaagccctctggctacgggtagatgagctcttttccgagcttaaacgctggcctcgcctccagcttaaaaccgaccatctgccggaaaaagccgccaataccaatcttggtttccagaaattaccggatttggctatccaggcacagcagaaagcgccgctggacgcgctgcgtaagttcctcgaatctttcagcggcccggtgattttttctgtggaaagcgaaggacgccgcgaagcgctgggagagctcctggctcgcataaaaatcgcgccgaagcggatattacgccaggacgaggcgcaggatgcgggacgctatctgatgattggcgccgcagaacatggctttatcgacacccaacgcaatctggcgctgatttgtgaaagcgatcttttgggtgagcgggtggcgcgtcgccgcctggattcccgccgcacgatcaacccggatacgttgattcgtaacctggcggagctccacgtcggtcagccggtagtgcatctggagcacggcgtcggacgctatgccggcatgaccactctggaggctggcggcatcaagggtgagtatctgatgctcacctacgccaatgacgccaaactgtatgtgccggtctcctcattgcatctgattagccgctatgccggcggcgcggaagaaagtgcgccgctgcataaactgggcggcgacgcctggtcgcgcgcccggcagaaagcggcggaaaaagtgcgcgatgtcgcagcggaactgttggatatttatgcgcaacgggcggcaaaagaggggtttgcctttaagcatgatcgtgagcagtatcagttattctgcgacagcttcccgtttgaaacgacgcccgatcaggcacaggcgattaacgccgtattgagcgatatgtgccaaccgctggcgatggacaggctggtgtgcggcgacgtcggcttcggcaaaaccgaagtggcgatgcgcgccgcgttcctggcagtggaaaaccataaacaagtagcggtactggtgccaaccacgctgctggcgcagcaacactatgataacttccgcgaccgtttcgccaactggccggtacgcattgagatgctgtcccgctttcgcagcgccaaagagcagacacaaatcctggcggaagccgccgagggtaagatcgatattctgatcggtacgcataaactgctacaaagcgatgtgaagctgcgcgacctgggcctgctgattgtcgatgaagagcaccgtttcggcgtgcgccacaaagagcgaattaaggcgatgcgcgccgatgtcgatattctgacgctcacggcgacgccgatcccgcggacgctgaatatggcgatgagcggtatgcgcgatctctccattatcgccactccccctgcccgtcgtctggcggtaaaaacctttgttcgcgagtatgatagcctggtagtaagggaagcgattctgcgtgaaatcctgcgcggcggtcaggtttactatttgtacaatgacgtcgaaaatattcagaaagccgcagagcggctggcggaactggtaccggaagcgcgaatcgctataggccacgggcagatgcgtgaacgtgagctggaacgggtcatgaacgatttccaccatcaacgttttaacgtgctggtgtgtactaccattatcgaaacggggatcgacattcccaccgctaacacgatcatcattgaacgcgcggatcatttcggcctcgcgcagttgcaccagctgcgtggccgcgttgggcgctcgcaccaccaggcctacgcctggctgttgacgccacatcctaaggccatgaccaccgatgcgcaaaaacggctggaggcgattgcgtcgctggaggatttaggcgccgggtttgcgctggcgacccacgacctggagatccgcggcgcgggcgaactgcttggcgaagagcaaagcggctcaatggaaaccattggcttctcactctacatggaactgctggaaaacgccgtcgatgcgctgaaagcaggccgcgaaccctcgctggaagatctcaccagtcagcaaacggaagtcgagctgcgaatgccgtcgttgctgccagatgattttattccggatgttaatacccggctgtcattctataaacgcattgccagcgcgaagaacgaaaacgagctggaggagatcaaagtggaattgatcgaccgcttcggcctgctgcccgatccggcgcgtaatctgctggatatcgcccgcctgcgccaacaggcgcaaaagctcggcatccgaaaactggagggtaacgagaaaggcggaacgattgagttcgccgagaaaaaccacgttgaccccgcctggcttatcgggttgctgcaaaaacagccgcagcatttccgtctggatggcccgacgcgcctcaagtttattcaggatttaagcgaacgtaaaacgcgtatagactgggtacgccagtttatgcagcaactggaagaaaacgctattgcataagcgtcaggccgggcgtcattactctgcgtccggcctaatctttacaaattctttgcacttccctgcagttccagacacagccaaccgccataattcttatttcctcttttataaaaataaccacataataatcatgggcttattataatgttcaacaatacgcgactctctcgctggtgggcgttgtttgcgcttaccgcgaccatcatgcttgcccttcccgcgcaggcgaatacgtggcctcttccgccccccggcagtcgactggtgggagaaaataaattccatgtcgttgaagacgacggcggctcgctggaggcgatcgccaaaaaatataacgtgggctttttagccctgttacaggccaaccccggcattgatccttacgtgccacgcgcaggcagcgtgctgacgattccgctgcaaacgctgctaccggacgcgccacgtgaagggattgtcattaacctcgcggaattacggctttactattatcaaccggggaaaaatacggtcacggtctaccctatcgggattggccaactgggcggcgataccctgacgccaacgatggtgacgaccatttcggataaacgcgccaatccaacctggacgccgaccgccaatattcgcgcacgttataaagcgcaaggcatcgatctccccgccgtggtgcctgccggtcccgataacccaatggggcatcacgcgattcgtttagcggcctacggcggcgtctatctgttacatggcacgaatgccgattttggcattggtatgcgcgtcagttccggctgtatccgtctgcgcgacggtgatatagagacattgttccgtcaggtcacgccgggaaccaaagtgaatattatcaatacgccgattaaagcctcggtggagccaggcggcgtgcgactggtggaagttcatcagccgctgtctaaaaatataggcgacgatccgcaggtgctgccgattgtgctgaatggcccgatgcaggcctttaaggacgcgccgcagaccgatgctgcggtgatggaacatgttatggaagtgcgttccggaatgccggtggatgtaacccgtcaagcagaggcgaaaccgcagtcgctgtaagcgtgaatagctgaccgacaaaaaagcctcgcgatgcatcgcgaggctttctttttttattgtggcaatcgcagcggcattaatgagggttaatgcttacttatagattaccgccgtaccgtgaagggtattcgggccggtaacagaggtaatacggaaagacttcgcccccatctcctgcgctttttgcgccagctgatcttccagcgagcccagattcgtgccgccattcgcggaaatggtaccgaacttctgttgaccttctggcgttgcctgaacttcaacggcggcgaagctggcgaatgagagcgaactcagtacggcagcagcgatgaggttttttacgtttttcatagtgatgacctttagcagatgaatgggtgtcgtaagcattaacttaacgatcgataaattaatcatagatgtgatctacatcacacgtcaacttctttttataatgatcgttatataatttataaagatgttatttttcatgtgaatagaattgatttatttttctaatgaatactctggagccagaagtggtttgtttttataatagagagaccgctctttaaacaggtacaacggcatcatgacaacggataccacgagttgcgcgaagaaaagccgtggccgaccaaaagtgttcgacagggaagccgcgcttgataaggccatgactctcttctggcagcacggctatgaagcaacttcgcttgccgatctcgtagaggctaccggggcgaaagcgcctactctctatgcggaattcactaataaagaaggattatttcgcgctgtcctggatcgctacatcactcgctttgcctcaaagcacgaagcccagctcttttgtgaagagaaaagcgtggaatcggcgctggaagattacttcacagaaattgccgcctgctttaccagtacagacacgccggctggctgctttatgattaatacgtccgccaccctcgccgcctcctcgcgcgatatcgcccgcacggtaaaatcacgccacgccatgcaggaacagacgctcatccagtttctgcgccaacgtcaggagcgcggtgaaattccggcgcactgtaacccgcaggcgctcgcggaatatataaactgtattttacagggaatgtcgatcagcgcccgtgaaggagccaccttcgaacaactgatgcaaattacgcgtacgactctgcgcatctggcctgaactacttaagtcctgaacgacgcggcttcggataaaaaaagcccctcagcctgagcgaatgaggggctaacttgcagagtacagcttttttatgctttgttattcagaaccagttggccattgccgtcgaggggaatttgcgttccggggtctttatccatgcggattttgccctgctgatcgccaattttgtaggtcacgtcgtagccaagcatcttttcagatttgtcatacaccgtcttacagcgttgctgcgtggtagtgtaagtatcactttcctgcattgacccctggatttgattgccagcataaccgccgcccagcgccccgacgaccgtcgccacatctttaccacgaccgccgccaaattgatgtccaatcacgccgcctgctactgcgccaagcaccgagccggcaatacggttttcgttctgaaccggtctgcgatgcgtgaccgtgacattacggcactcctgacgcggcgtttttaccgtctctttaatcggtttagccgatatcacctgcgcatattgcggactacgatcaaatacgttgagactggccactgccgccacacccagcgcagccgctacgccaatccctatacccgccaacattgatttattcacgggagctcctccttcgttgctattggtaacaattttgcaaccagtatgcgaacaaagccaatcggaatgaggatgaaaaatgcgggatgaggcggtaaagctgaaggattcggacaactccgaagcaagagatggagaagcgctcaccggcgcgagcagccggtgaggcgcagagaaattaatgcagtttcagacgcggacgaatgacgcggttaatactgcccaccagcatcatcaggccggttttaaagtatccatgcagcgctatctggtgcatacggtatagcgagatatacacgaagcgggcgatacgtccttcaatcatcattgaaccgcgggtcaggttccccatcagactacccacggtagagaagttggacagagagaccagcgatccatgatctttatactggtaagctttcagcggtttgccattcatctgcgccagaatgttattcatcgcgcaggtagccatctgatgcgccgcctgagcgcgaggcggcacaaaacctccctccggacgtgcgcaggaagcgcagtcgccaatcgcataaatatcaggatcgcgcgtggtttgcagcgtcggttccaccaccagttggttaatgcggttcgtttccagaccaccaatctctttcataaaatctggcgctttgatacccgccgcccacaccatcagatcggcctgaatatattcaccttctttcgtatgcagaccgccttcgtcggcgctggtgaccatagtttgcgtcagcacgcgaacgcccagtttggtcagttcattatgcgcggcgctggagatacgcggcggcaacgcaggcagaatacgctcgccagcctcaaccaacgtcacgttcagcgcgtcgttggtcagccccttataaccatagctatgcagctgttttaccgcattatgcagttcagccgacagctcaacccccgtcgcaccgccgccaacgatggcgatattgaccttaccgttcgcgcccagattagccgaatacttgaggaacaggttcagcatctcctggtgaaaacggcgcgcctgatgcgggttatcgaggaagatacagtgctctttcacgcccggcgtgttgaaatcattagaggtgctgcccagcgccatcaccagcgtgtcatacgcgattttgcgctccggcaccagcagttcgcccttttcatcacgcaactcggcaatggtgatggtcttcgcttcgcgatcgatatccatcaccgaccccagctggaactggaaaccatgattacgcgcatgagccagatagctcagcgcatccacgccttcgtccagagagccagtcgccacttcgtgcagcaatggtttccacagatggctgtgatttctgtctaccagcgtgattttcgcttttttcttgcgccccagtttatggcctaactgcgtcgccatttccagcccgccagcgccgccgccgacaatcacgatcttttttaatggtgtagtcaacgtgacccccttaaatttattaaccaattgttaattaaaagttattagtatagcctttaattaacaacaagttacgttaatgagaataagcttctgatatgagaatagcatgaacggtgcattggtcataccaaaattgatgtgcatcaagttttcatgctgaaaagatagacagtttgcgagaattgagcataaaaaaaccagccgcaaggctggttatccggtcactgataacgccatattgccggatggcgttatcccagcgttttaaacgctttgatacgttgcaaatgcggcgaaatatttttgaatttgtgagtctgttcctcatcccacacaatttcataatacgggtgaagcgcttgcgctgagcgttggctgtccagcgcttcgtcatgacgcgagaggatcaccagacaacgatcgcgatttttttcgcgaaagttggtcacgcactttgtagcgatgtccgcatattcttccgggcgatcgattttcccctccatgttttcataggggaacaggttcgggttaaaaaccacctgacggatatcgcacaaaaagccaatccgctccgcccagtaaccgcccagccccacgccacagattaaagggcgctcgtccacattcaactgcaacattttgtccacttctttcagcagatgctgcatatcgtgcttaggatgccgcgtactgtagcttaccagccgaacatccgggtcgataaactgtaattgcaacactttttcatggttgcccggactatttgaatcaaaaccgtgtaaataaataatcatctggcaccctcacgaaaactcgagttaatgacctgctttttcttcctgccagcgttcatgtaactggttgagctgggcgctggctgttttccagcgtgctgagtccatgagctcccggcgtgaaaatgaacctttatgatacaaacgtgtaacacgttctgctttgatcggcgacagattatccagcacgctgactgcgcctttacgattattgcagaccagaatcatatcgcaacccgcatccagcgacgcctgagcgcgctcagcatagctgcccataatcgccgcgccctccatcgacagatcgtcggagaaaatgacgccatcaaagcctaactcctgacgcagcaccgttttcagccagtacggcgaaccgcttgccggacgcggatcgatagcgcggtagatcacgtgcgcaggcataatcgcatccagtttattctcgctaatcagcgtgcggaacaccgacatatctttgccacggatgtccgtttcaggacgtggatcgcacggcgtctctttgtgggagtccgccgtgaccgcgccgtggccggggaaatgcttaccggtcgttttcatcccggcgtcatgcataccgtcaataaagcgtgttgccattgccaacgcttttgcgggatcggcatgataagaacgctcgccaattgccgcgctgatatgcccgacgtccagcactggcgcaaaactgatatcaatatccatcgcgatcatttcgctggccatcagccacccagcctcctgcgccagtcgccccccctcttccagcccatgcagcgcaaaaaaagattgcgccgcgggcaggcgggtaaacccttcacggaaacgctgtacgcgcccgccttcctgatcgacggccaccaccagatggttacgcgatgccgcccgaatctggcgcactaattcgcgcagctgttccgggtcatggtaattacgcgtgaacagaataagcccgccaaccagcggatgcgccagtatctcgcgctcctccgcatccagctcacatccttcgacattcaacattactgggcccacactgctctccttatcctttcatacgtagctggcgccaggtttcatcggccagcctgataaattgttgctcgccggtttgtcgccagcggtattcgaaccaccctgcttttagcataatgacccaggggtgccataatcgtatctgtcgccatagctgccgggcgtcgattcgcgcgcgcgctgcatacgcgtctgccagttgtcggtgctggcgttcatcctcaacccatactgccgccagctccaacgcaatatcgccgtcgccggcatactcccagtcaatcagtctcaacccggcggacgttaatactatattgtcgccatggacatccatatgcaaaggcgcgagccgcagcgggcgaggttcaccgtttttttgcaactgtttgagccgccgcaaccaaaacggcgtacgcctcgccggatcgcaacacgaccagtactgcgccaatagtggcgatagcgcgatacgccagccaaaacgcggctgttgatgcaaatgatacagtaaggccgccagttcgtcggcatctggcagagcggaatttaccacaccatgcagatattctaccgccatccagcccggcgtataaaaaagcgctcgcggcgcaagactggccggcaattgggataaggcgcggtaatgacgtaaaaaatgggctggtggagcgtcggggtcgtgatgacggcgcagcacgatacggtgagtatcgtgggcaataatacagctcccgccgcttagcccctgcgatgcggcgacggcgggacgatactggggaaaatagcgcgacaggatctcgtcgcgcgttaagggattattgttgttggaccgcacctttacctgaccagattatctcgcccgtttgcaccagcattaactgcatctgtaatgcaggcgcgttaacgttaccggatgcgctggagtaaagtacatattgcgccccgacattgcgcgcaatgccaatagctttactgcgcgttcccagactatcctgcggagacaaccctaactgctgttttgccatcgagagttgctgtacggagaccagcgtaaatttaccgttgttcgccagcgcattacgtaacgtttccgttgcctcgttcgcatttaacgacccattcgtccggttattcacgctgtcgacaagcaatacgcttccggccgtcacgccatcagcctgcaacattttgctgaccagcggttgcatcgcgccgttccagtcatagtggcgcaccttaggcgctggctggcccgtttgatcttcatgttcgatcggccccggttgctgtggaatggttggcacagacggcacaacaggaggttgcggtggctgcgcgggttgttctggcgctggttttacctcttcaactggcgcaggttgacgttgcgccatacacccggagagaaatatcgccagcgcagcaatggcggcgtagcgatgcatttttgtcatcaaaattcactcctcacaaataaagataaagcctgaccttatgcgcccccagataattggcgctgccaaatagcgttaccgacgaacgcgcgggtatggttacgctacgcggcgcctccagcggatgcatctccagcccccgcgcgtcataccagtaaaaccgataatgaacggttatgggctcttgcctttcgttatagacgcgggaagaggctgatggctggatatcagacgccgtcagttcaggcggctctgcggtgacgcccgccgccagaaccgtggactccatcaccagcgactgcgcgtcgcttaccggaatttcagggtgtgaccggcagccggtaagcagcagcaagcccagagaaaccgcgatgcatcctttgatcatacttacaagcctttatgcgccagcatcgggcctagcgggcggccgcccagtaggtgcatatggatatgataaacctcctggcccccatgacggttggtattcatgattaaacgatacccatcttcggcaatgccttcctgttcggcgattttcgccgccacggtgatcatccgacctaacgcctgttcatgttccgccgtcacgtcattgacggttgggatcaggatattgggaataatcaagatatgcgtcggcgcctgcggtgaaatatcacgaaaggcggtgaccagctcatcctgataaacgatatccgaagggatttcacgacgaataattttgctgaatatagtttcttctgccacgacgttttcctttttcataatagcccttgcagcgcacatgctacgccgagccatactgcgagtatagagtatgagcgagttaccgacgctctttcaactttaacccacgatatattaagcgaaaaatgactacatgctggacttaccgccatatccccctgccatgacgcctttgtacgcttaaaaaatatttctagtttccctggttataccgttttacacatttaatacaaatgcgtatatttctcatttgcatttttatacacattaactagcaaagaatgaaaaggttcaacgtcatacgtcctgaacttaccccaataacaagcaaggattttcagatgtctttcattcaataccgccgggacaaacaccttccgtccaccgccgcaccgtcgctgttagctatgggtatggcgatggcatttatgcctgccgccttcgcggctgaggataccgttattgtcgaaggcgcgacgaccgctgacgccgtaaaccgcgaagaacaggattacagcgtgaaaacgaccgcagcgggcaccaaaatgccgatgactcagcgcgatatcccgcagtcggtcagtattgtcagccagcagcgtatggaagaccagcagttgcaaaccctgggcgaagtgatgaccaatacgctagggatcagcggaagccaggctgactccgatcgcatcagctattactcgcgcgggtttgaaattgacaactatatggttgacggtattccaacgtattttgagtcccgctggaatctgggcgatgcgctaacggataccgcgctgtatgagcgcgtggaggtggttcgcggcgcgaatgggctgatgaccgggaccggtaatccttcggcctcaattaatatgatccgtaaacacgccaccagtcgggagttcaaaggtaacgtttccacagaatacggtagctggaataagcagcgttacgtcatggatctgcaaagtccgctcaccgcggacggcaatgtccgtgggcgcatcgtggcgggttatcagaataatgattcctggctggaccgctataacagtgagaaagcgttcttttccggaattgtcgatgccgatctgggtacaaccaccaacctttcagccggttatgaatatcaaaaaattgatgtcaacagcccaacctggggcggtctgccgcgctggaacaccgatggcagcaaaaatagctatgaccgcgcgcgtagtaccgccccggactgggcttataacaacaaagagataaataaattcttcgtcacgcttaaacagcgttttgccgaaagctggcaggcgaccctgaatgcgacccatactgaggtcaaattcgacagtaaaatgatgtatatcgatgcgttagtcgataaagagacaggtacgctggtgagtccttatggcgcaagctaccccgtggtcggcggtacgggctggaacagcggcaagcgcaaagtagatgccatagatctctttgccgatggcgcttatgagctgtttggccgtcagcacaatatgatgtttggcggcagttatagtaaacagaataaccgctattttagcgcctgggcgaacgtctttccggacgacattggcaacttcagcgcctttaacggtaatttcccccaaacccactgggcgccacaaaatctggcgcaggacgataccacgcatatgaaatcgctgtatgccgctacgcgcatttcgctggccgacccgctgcatctgattctcggcgctcgttataccaactggcgtgttgatacactgacctacagcatggagaaaaaccataccacgccgtatgccgggctgatttatgatatcaacgacaactggtccgcttatgccagttatacctctatctttcagccgcagaataaacgcgacaaagcgggtcaatatctggctccgattaccggtaataactatgaagcgggtctgaagtccgactggatgaacagtcgcctcaccaccacgttgtccgtgttccgcattgagcagaataacgtcgctcaggcaaccactattcccatccctggcagtaatggggagtttgcctggaagtctactgacggaacggtgagcaaaggcgtcgaatttgaagtgaacggcgcaattaccgataactggcagatgactttcggggctacccggtatgttgccgaggacaatgaaggtaacgccgtgaaccctaatctcccgcgcaccagcgtgaagttattcacccgctatcgtctgccggcgataccggagctgacggtcggcggcggcgtgaactggcagaatcgggtttacaaagataccacgacgccgtacggcactttccgcgccgaacagggcagctatgcgctggtcgatctgtttacccgctatcaggtgacgaaaaatttctccgtacagggaaacatcaacaacctgtttgataaaacctacgacaccaatattgatggttccattgtttacggcgcgccgcgtaacgtcagcctcaccgccaattatcagttctgacagactgtcggagagcggcatgtaaagcgccattaaaaaaggcagccgaatggctgccttttttctccccaacatcattactgcttagctgttacggatgtactcatccatttccgttttcaggttatcggatttcgtaccgaaaatagcctgaacgccggaacccgcgacgacaacgcctgccgcacccagtttcttcaggccagcctgatccactttcgctacatcggctacgctcacgcgcagacgcgtgatacaggcatccaggttagtgatgttctctttaccgccaaacgccgcaaccaaagccggcgccatttcgctggtcgcgcccgcttttgcgtcatcagtagtgtcttcacgacccggcgttttcagatccagcgctttgatcagcacacggaacacggtgtagtacacaatcgcataaccggcaccaacaatcgggaacagccacaatttgctgctgttaccggacagcacgataaagtcgatcagaccgtgggagaacgacgtaccgtcacgcatccccagcaggatacagatcgggaatgccagacctgccagaatcgcgtgaatgatgtacaggatcggcgccacgaacatgaaggagaactcgataggctcggtaatacccgtcaaaaacgaggtcagcgcggcggaaatcatgataccgcccacttttgcgcggttttccggtttagcagagtgccagatagcaatggccgcagccggcagaccgtacattttgaacaggaagccgccagacaacatacccgccgtccggtcgcccgccatatagcgcggaatgtcgccgtggaatacctgacccgctgcgttggtgtattcgccgatctgcatctggaaaggaacgttccagatatgatgcagaccaaacggcaccaggcaacgctcgataaaaccgtaaataccaaacgcgacaaccggattctgataagccgcccactgcgagaacgcctggatagccgtaccgattggcggccatacgaaagacagcaccacaccggtaaaaatagcggccagacccgaaatgatcggcacgaagcgtttgcccgcaaagaagcccagatactcaggcagtttgatacggtagaagcggttaaacatatacgctgcgatcgcaccggagataatccccccgagaacacccgtatcagcaaggtgtttagcggcgatctcttcagcaggtaaatgcagaaccagcggcgcaaccacagccatggttttcaccatgatgccatacgctactaccgccgccagagccgaaacgccgtcgttgttggtgaagcccaacgccacgccgatagcgaaaatcagcggcatattggcaaaaacagatccgcccgcttctgccataacgtgcgatacaacggctggcagccagctgaagttagcggaaccgacacccagcaggatacctgcgatagggagtacggataccggcagcatcagcgatttaccgaccttttgcaggttagcaaatgcattcttaaacataattgagagtgctcctgagtatttgtgcttttctacgttctcacgcattggcgaggggggagaaccccgccgtggacaggacatctaagtgcccttttatttattacacagagtaaaataaatacgtctgattttgtttgacggctatcacgtttcagcgccagatagcctaaaaagtatcacattctgccaaaatgagtttccgaatgtttccacaagctcgttcaccgccccttttgtggcggtgaactttacgcgctttgcttattaattacgagctttaaaaaaactcgtttaacggattgatgacaggcgagacgcgtcaatatggaacaggcgagcaaagttatcggtggtgatctgcgccagttcttcaacggcaacccctttcaataccgccatatattctgcgacgtcgcgtaccatcgcaggctggttctctttaccgcgatgcggcaccggcgccagataaggagaatcggtctcgactaataaccgatccagcggcacatagcgcgccgcatcacgcaactgttcagcgttacggaacgttacgatgccggaaaaagagatataaaaccccagatccagcaatttgccggccgtttctctgtcttctgtaaaacagtgtagtacgccgccgcaatccgtcactttttcttcgcgcaggatagccagcgtatcggcacgcgcgtcgcgagtatggacaatcaccggtttatgcaattcgcggccaatctggatatgatgaataaaagacgcctgctggcggattttggtctcaggcgtgtaaaagtaatcaagcccggtctcgcccatcgccaccacatcgtcttctgcagcaaggaggcgcagttcttctacgtcatatgcttcatcctgatttaacggatgcacgccgcaggaaaagaccacattatcgcgcttgcccaccagctcgcgcatatggcgataccccggcagcgtcgtcgccaccgctaaacagaacttcacatcgcgcgcggcggctttcgccagcacatcgtccacgtccttatgcaaagattgataatccagaccatcaagatggcagtgtgagtcgactaaaaacataatgtctctctcaaagatgaggaacaggcaacaaggtgcctggttgcaggtaatgctcgatgcggagaatgagatcggttaataccagttcgcgatttaatccggtcacatgaagtaattgatcacgacaatggcaaacatcgttcaggattgcctgaatacgcgccggggatagcggccccgccagcgcggcaacaaccgcgtccgcatcaacgtttgtcaggtacgacgcgccgtgctgacgtttcagcgcgtctaccagcagcgtcgccagccaatgcaggcgcgccggggcttgctcatgattgagcgccgttaataacgcataccagtcgcccgtatgtaaactgtccatcaacgcctgacacagcgcctcacgctgcgcccaacgttcagactgcaacagcgccagcgcggcgccgggcgaccccgcattcaggcgtagcgccgtgagcaatgcttcttgtgacgccgtcacttctcgcgacagccatgacatcgcatacgattcggacggcgccgccagatgatgcagccgacagcggctacgtaatgtcgccaacagacgagcaggctccgggctggcaaggaaaaaccaggtttgctccggcggctcttccagcgttttgagcaacgcattggcggcggcgtcggttaatagcgccgcatccgcaatccacaccaccttcgcgccgcccagacgggagtgctcgtacaatttctcgctgacctcgcgtaccgcatctacgccgaggctgcttttgcctttatccggcgtcagcgtgtaatagtccggatgcgtgccagcctgcataagctgacaaccacggcaatgcccacagcttttgtggccctcaggctgctggcataacagataacggctcagcgcatagcacagcgcctcgtcgcccatgccaggtaaggcctgaatcagtagcgcatggtgcccacgtcccgcctggtaactttctaccagtttttcataggcgggccgtaaccatggataccatttcatgccgcttgctcctgcacccacttcgtcaccgtggcgcgaatgtcgcgcatgacggcatccagcggctgggtcgcgtcaatggtgcggatacgcgagtcttgcgccgccagttccagatagcgcgcgcgagtccggttaaagaaatcaaaagattcctgctcaatgcgatccaaatcgccgcgcgctctggcgcgttttagcccgacttccggcgtgacatccagatacagcgtcaggtcaggacgaaaatcgcccagcacggcatcgcgtagtgtcgccagcatggtttgatcaatgccgcgccctcccccctgatacgcctgggtcgagagatcgtggcgatcgccgatcacccatatgccttgcgccagcgcgggtttgattaccgtttcgacgagctgtacgcgagcggcataaaacatcagcacttccgctttatcggtaatcacttcgtcgcctaccgatcggatatccagcaccagacttcttagtttttcggcaagttgcgtcccgcccggctctcgggtaaaaatcatattacgaatacccagttgctcaagggtctccaccaccacgtcgcgcgcagtggtttttccggcgccttccaggccctcgatgacgatataattactgcccatttttttccttaagcactttcaggtactcctgcactgaccgattatggctggcaagattggtgttaaatgtgtgaccgcctttaccgtcggccacaaaatagagatacggcgttttcgccggatgcgccgccgcctgcaatgacgcttcgctgggcgatgcaatcggtcctggcggcagcccggttatggtatacgtgttataagccgtcggcttttccagatccgcacgcgacaagttaccattataactcgtccccattccgtaaatcacggtgggatcggtctgaaggcgcataccgattctcaggcgattaataaagactgaggccacctgatcgcgttcgctggcgacagccgtttctttttcaataatcgaggccattgtcaccagttggttctgatctttataaggcagcccctcggcccggcctttccagacagtatcgacagctttcaccatcttttggtgcgctcgcttgagaatagcgacatcgctggtgttggcggtatacatccaggtatcgggccagaaccacccttctacccattccggatgcgcaagctttaatgcctgagcgacagtggcgtagtcatcatccggcaatgtatggcgaatatacggcgcctctcgtaactgtttcaggtaatcgctaaggcgcatcccttccacaaaccgcaacgggaattgcgcttctttgccgctctccagcaactcaagcatctcccgtacggtcatccccggcgtaaaacggtaagttcccgctttaaagtgcgataactcaggctccacgcgcagcagccactgaaatacccgggggcgattaatgattttttcatcataaagctggtcgccaagcgccagccgccccgttcccgccttgagcgtaaagatagtctcgtttttaataagtaacgtgctgttcgccagatggcgaactttccacatccccacgcccgcggcaatacccagcacaaccaacagcagaaggaaaacgcctgacaattttttcataactaattcggatgctcacaaaatggggctaaaaattgaaacagtgttcgcgaagaatacgacgtcccgtgataggcgcgtatgggaataatcggcattagcgcgttgcaaatgataatctcatccgcctgcctgactgcctcctctctcgcctgtacttcaagaacctggaaaggagattgcgccagttggcgtaaacaaaattgtcgcataatgccgttcaccccggcctgatccagacgcggcgtaaaaacaatgtcgcctgtacgccagaacaaattagccgcacagcattccgtaacccatccctcgctgtcaagaaccagcgcctcatcggcgtccgtctgctcaagatgagagcgaatcaacacctgttcgaggcggttcagatgttttaatccggcaagataaggattgcgcccaagcggtatgggactaagggtaagagtgatgccttgcttacgccactgagaataataagcgggataagcagaaacggagaggattcgggtagctgcctgacaattcatggcgctgtatccccggccaccgctaccacggctaatgatcactttcaacacgcctgaatcatgccctgtggccaacattgtcatctcttgccgaagggtcgcccaatggctaaaagcgatccgtaatttttcacaggcaacctgcaagcgctgaagatgcgcttccagatggcaaatgttgccatcaacaatacgtgcggtcgtaaaactgccatcgccgaactgcgtcgcccggtcgcttacagcaagttgatcctgcgcatggccattaattaaaaacatagtggctccttatccgtcgcctgctagtgtggcaggatgaataacgcagaacaagaggtgatatgcctgataaaaaaggcccgacaagcggacctttttattaatgtctgtctctggcttaacttagatctttttaaaaatcaaggaaccgttagttccgccaaagccaaaggagttacacagagcgtactccagatcgctgacctggcgcgcttcatgcggcacgaagtccagatcgcaaccttcatccgggttatccagattaatggttggcggaatggcctgatcgcgtaacgccagaatagagaaaatagactctactgcgcctgcggcgcccaacagatggccggtcatcgatttggtcgagctcaccatcactcggcttgcggcatcgccaaagactgacttaaccgcctgcgtctcagctttgtcgccggcaggcgtcgacgtgccgtgcgcgttgacgtagccaatctgagcaggctcaatcgcggcatcacgcaacgcgttaaccatcgccagcgcagcgcctgcgccattttccggcggcgacgtcatatggtaagcatcgctgctcataccaaagccgacgatttcagcatagattttcgcaccacgcgctttcgcatgttcgtactcttcaagcaccaacataccggcaccgtcgcccagtacaaaaccatcgcgttctttatcccacggacggctcgccgcctgtgggttatcgttgcgggtcgacagcgcgcgcgctgcgccaaaaccgcctacacccagcggcgtactggctttttctgcgccacctgccaccatcgcgtccgcatcgccataggcgatgatacgcgcggcatggccgatgttatgcacgcctgaagtacaggcagtcgcaatagagatgcttggcccacgcaggccatacatgatagtcagatggcctgctaccatgttaacaatcgtcgacgggacaaagaacgggctaatcttacgcggtccgccttttaccagcgaactgtggttttcttcgatcagaccgagaccaccgataccggagccgatagcggcgccaatacggcttgcgttctcttccgtcacttcaaggccagaatcctgcatggcctgtacgccagcgacaattccatattgaatgaaggcatccatcttgcgctgttctttgcgcgagataatgtcatcacagttaaaatcctttactaagccagcaaatttcgttgcataggcgctagtatcgaaatggtcgatcaggctgatgccactctgaccggcaaggagagctttccaggtagactctacggtattgccgacaggagacaacatgcccagtccggtcacaactacacgacgcttagacacggttgtcctccagggagggaaaatgattctagtgggacaaaaagataaaactcaggcggtcgaacgaccgcctggagatgttcacttacgcctggtggccgttgatgtaatcaatggcagcctgaacggtggtgattttctcagcttcttcgtccggaatctcagtatcaaactcttcttccagagccattaccagctcaacggtgtcaagagaatctgcgcccaggtcttcaacgaaagaagcattgttggttacttcttcctgcttaacgcccagctgttcgccgataattttcttaacgcgttcttcgatagtgctcatactcttaaatttcctatcaaaactcgctttcgcgatggttttcgtagtgtataaaatgttgaaaaatttgcaactaaatcccggcaggtcttaccacgattttacgttattttgcggcctttcgccctaataacgcaaatatttttcaatcgtgattaaaccatgtacattccgccgttgacgtgcagagtctcaccagtgatgtaactcgcttcgtcagaggctaaaaatgcaaccgcactggcgatttcctgagcgccgccgaggcgacccgcaggcacctgcgccaggatacccgcacgctgatcgtcagacagcgcacgcgtcatgtccgtttcaataaaacccggagccacaacattgacagtaataccacgggacgcaacttcacgcgccagtgatttactgaaaccgatcaggcccgctttcgccgcagcgtagtttgcctgacctgcatttcccatggtaccaaccacagaaccaatagtgataatgcgaccacaacgctttttcatcatagcgcgcattaccgcttttgacaggcggaaaacggatgataaattggtttcgataatatcgttccactcatcatctttcattcgcatcaacagattatcacgagtgataccggcattattaaccaggatatccacttcaccaaattctgcgcgaatattttccagaacagattcaatagatgcaggatcggtcacattcagcatcaaacctttcccgttagcacctaaatagtcgctaatgttcttcgcaccattttcactggtcgcagtcccgataactttcgcgccgcgggcaacgagagtctctgcaattgcgcggcctatgccacggcttgcaccagtcaccagcgcaatctttccttcaaagctcatggttttcctcttttattgcgtaagtgccgcagacagcgccgccggctcgttcagcgccgacgctgtcagggtgtcgacaatacgtttcgtcagaccagtgaggactttacctggacccacttcataaagatgttcaacgccctgcgccgcgataaattccacgctcttcgtccactgtaccggattgtacaactggcgaaccagcgcatcgcggatagcggcggcatcggtttcacatttcacgtcaacgttgtttactaccggcaccgttggcacgttaaaggtaattttggctaattcaaccgccagcttatctgccgctggtttcatcagcgcgcagtgcgacggtacgctcaccggcagcggcagcgcgcgtttcgcgccagcggctttacaggctgcgcctgcgcgttctaccgcctctttatgcccggcgataaccacctgtcccggcgagttaaagttaaccggtgaaacaacctgcccttcggcagattcttcacaggctttagcaatagaggcatcatccagccctatgatcgcagacatgccgccagtaccttccggaaccgcttcctgcatgaatttaccgcgcatttccaccagacgaacggcatcagcaaagttgatgacgccagcgcaaaccagcgcggaatattcgcccaggctgtgacctgccattaacgcaggcattttaccgccctgctgctgccaaacgcgccaaagcgcgacggaagcggttaatagcgccggctgcgtctgccaggttttattcagttcttccgctggaccttgctgggtgagcgcccacagatcatatcccagagccgcagaagcttcagcaaacgtttcttctacgatagggtaatttgccgccatctcggccaacatcccaacgctctgagaaccctgaccggggaacacaaatgcaaattgcgtcatgtttaaatccttatactagaaacgaatcagcgcggagccccaggtgaatccacccccgaaggcttcaagcaataccagctgaccggctttaattcgcccgtcacgcacggcttcatccagcgcgcacggcacagaagccgcggaggtattgccgtgcctgtccagcgtgacgacgacattgtccatcgacatgccgagttttttcgctgtcgcgctaatgatacgcaggttagcctgatgcggcaccagccaatcgagttctgagcgatccaggttattagccgccagcgtctcatcgacaatatgcgccagttcagtgaccgccactttaaagacttcattgcccgccatcgtcaggtaaatcgggttatccggatttacgcgatcggcattcggcagggtcagtaattcaccgtaacggccatcggcatgaagatgagtggagataatacccggttcttcagaagcgctcagtacggccgcgcctgcgccatcgccgaaaataatgatcgtaccgcgatcgccaggatcgcaagtgcgggctaatacatcggaaccgaccaccagcgcgtgtttaaccgcgccggatttaacgtactggtcggcgatgcttaacgcgtaggtgaaacctgcgcacgctgccgcgacatcaaacgccgggcaacctttaataccgagcatactttgaatctgacatgccgcgcttggaaatgcatgcgttgctgatgtggtagccaccacaatcaagccaatttggtctttatcgatccccgccatctcaatcgcgcgattcgcagcggtaaagcccatcgtcgcgacagtttcattaggcgcggcgatatggcgttcacgaatacctgtacgagtgacaatccactcgtcagaggtctcaaccattttttccagatcggcgttagtccgcacttgttcgggcagatagctgccagtaccaataatcttcgtatacatgtacgctcagtcacttttcggttatataccgttacctgtaaacgtctggcacgctggcggcgccggggagacagcgatattatctgtgcgcccgcaggtttacgcctttgccatcgtccagcggttcaaatccggctgggtatacagattccaggcgagcggcaattcgctgaggaacttgtcgctgcaccgcctgcactgcctgttcaatcgcgactgcaaatgctcgctgattggccgcaccatgactttttatcaccgtgccgcgcaatcctaacagacaggcgccattatactggtcggggttgaggtgactgaatcgcctcgtcaggcttttttgtaaccaacgttttaataacagcagccaccacgaccgttttttcccctcgccctgtgatttcagcagtgaaaggaacattctgacaaccccctccatcgttttaagtgtgacattgcctgtaaagccgtcacacaccagtacatcggtttttcccgtcagtaactcattcgcctcaaggtagccgatgtaattgatggttgggactgtttttaacattaaagaggcttcgcgaatactgtcgaggcctttggtttcttcttccccgatattgagtagcgccacgcggggatttttgatcccgacgacctcttccgccaaaacggcgcccatcacggcaaactgcaccagcatggtactgtcacagtcgacgttggcccccaaatcaagcactaccgttttgcccttttgctggtgcggtaataccgtcaccaacgccggacgctcaatcccctcaagaggcttgagcaataatttcgccagccccatcagcgccccggtattaccggcgctaacgcaagcttcggctcggccttctttcacaagctccagggccacacgcatggatgtcccgcgactggcgcggatcgcctgcgaaggccgggcatcactggcaataactgactgtgcagggataatctgcagacgcgaacgttgttcaaagtcagctttggcaagtaatggcgtgataatatcgggattcccgactaaaagaagagtgagctgcgaattagcgttcagtgcctgcaatgctgcaggcaccgtcacggaaggaccaaaatcgccccccatgacatctaacgccagggttagacgtgtcaaggtatcgtcgctgcctggttcggtgttctccgcttacgcggagaaatcctcactaagctttatcacgcttgtactcttcggcttttacaccacaggcacgcctgtgatgcaaaaggcatcgagtatcgcgcgattacttagcgatgaccttacggccgcggtagtaaccgtcggcagtgatgtggtgacgcaggtgtttttcaccagaagttttgtctacagacaggctggtgactgcggtcagagcgtcatgggaacgacgcatgccacgtttggaacgggttggtttattctgttgtacggccatggaccttactcctcaattacggtttatccctgcgtccgcggggaagacctattacttacgctttaagctggctaatacggcaaatgggtttggcttttgcgcttcatcaggcagttcgccaaagaccatgtccgcctcggacacttcacagtgttcagaatcatgcaccggaactaccggcaaggcgaggatgatttcatcttcaaccgtcgccagcagatcgatttcgccgaattcgtttacctcaatcggctcatacgcttccggcagtgcttcagcctgctcgtcggaacggacagggctaaaacaatacgttgtgtgaacctgatgggtaaacggtttcccgcaacgctggcattcgagcgacaccgtaacgaccgcatcgccggttaaaacggcgagacgctggttatcgatagcgaacgacatggagcattccacatcactgtccacactgactacagattcggcaacgcgctcaacctgatcgggggtatagataccctggtaatcaaggcgtttttgagcggtacgaaccggatcaagagtcaggggtaattttaccttttgcatagggcgcgcatattaacttcgtaacgtcatatagtcaaagaaaaaggcagcctgcggttgccttttgccaataattcgcacacattgcgggttacagacttattttcgctcaagacgagtcagtatgacaggcttgaagaccgaagagcatagtttaagatggctctcatcattacgctatatctgagggaaaaaatatgccccgtctcatccttgcgtctacctctccctggcgtcgcgcgctgctggaaaagctgacgattcctttcgaatgcgccacgccggatgttgatgaaacccccatgccgggcgaagcgccgcgtcagttggtgctgcggctggcgcaggcgaaggcgcaatcgctcgccgcgcgtttcccgaatcatttgattattggctccgaccaaatttgtgttctggacggcgaaatcaccggcaaaccgctgacggaagaaaaagcgcgtcagcaattagccaaagccagcggaaatattgtgacgttttataccggactggcactgtataactccgcctccgggcacttacaaaccgaagtggagccttttgacgttcattttcgccatttaagcgaagcggaaatagacgactatgtccgtaaagagcatccgctgcactgcgcgggaagttttaaaagcgaaggtttaggcattgcattatttgagcgcctggagggccgcgatccgaacacgctgatcggcttgccgcttattgctctgtgccagatgctgcgacgggaaggcttcaacccgctactgcagtaaacggatattctgtaggcttttcaaataccgctaaaagccgtttctgcacgtgttggtagttatctcccgtttattggggagcagtttcgaccgcttccagttctaaccaactggaaagcgcttgttgtgaacaatttagcgcctgccgatcttcactctcttcgtgcgggcccgtttcctggtcaatccattcaccgaccagaaaaaaagcattggtattacgaaccgatgtacggtgcgttttatcccatagggtatcaacagcggtgtacgtgcgcgttaatgaattccccatctcagttcagttttgtaaaaacacatgttctcaatactcgcctgacgcgctctacggcgtcaaaagcggcttacaaacttattctcgcgagcaactctcaggacgtttactgtcctgaaaccttccctttgcgactcgttaaattccatctcgcgatgagtttacgcccccctaacattgcttcacctcacgacacattcctttaattaacgccgccagcatccgccgcatcttgttgactatttataaattcaaccatctgctgagtaagatggtttatatcattctgcgtaatgaaaaaattaaattgttgatcctgaaagtgttcttttgctgccaggtcgacaaaaaccgcttttccatccgtttcaaagcggactttatttccctgtttttgcagaaactcgcccattgcgaccagctggtcgagccgctttccgcgcagaaaataatagcgagtcatcgtctcatccagcggtgttacggttttattccacgcagcgtcaaagacaggcttcacatcagaggggagctttaaagcagaatatttttttctgttttcactactcacatttttcaaccgaaggataaatcgattgtttacgtcacgagccacacgtagctcgttcaggaaaaccagattatcacgctcagactgaataacaccggtgatcttatcctcctggccggtctcatacaccacagcaaagatttgcccgtaggcagctaatagtacatcgtagtcatcggcgtaatgaccaaaagcctgacgttgggctggcgtcaactcacagacgcccaccacgggagacgtaatgatttgcgtattcaaatactcaacgaaagcccgtcgtgaactatcgcccttcccttcgcaaccggtcagcatcgcgatcacgagcggcacgataacgtattttccccaacgctgagtaaatgagcgcatccagctagtattggccatctgttcgtccttaaacacgccgaaatccggatcgcaagaataaacagtacacaacggtaaaaatgcgtcggatacagcaaaacaaaaatattatgagaaaagtgagattcgggcagataacctgcccgagagaggaactattttgcgttacgcagcacctgcagacagcgcttcagggcgttatccatcggcgcttcaatgcgcatgacttcgcccgttcccggatgcgtgaacttcagcgccgcggcgtgtagaaagagacgtttaagaccggttcccgcttcggtaagctgttgatcaaactcacggtcgccgtagcgatcgtcgaacgcaatagggtgaccggcatattgggtatgtacgcgaatctgatgcgtacggcccgttaccgggctacagcgcaccagcgtggcgaaggcatagcgctcttccaccttgaagcgcgtttctgacggtttgccttcctggctcacgcgaacaatacgttcgccgctttgcagaatgttctttaataatggcgcctgtacggttttaacgtgcgattgccactggccgcgcaccagcgccagataatctttctgcattcccttttcgcgcagttgctcatgcagcgaacgcagcgcggagcgttttttcgccaccaacagcacgccggaggtatcgcggtcaagacgatgcaccagttccaggaatcgcgcttccggacgcaacgcccgcagcccttcgatgacgccaaaacttaacccgctcccgccgtgtacggcggtgccggaaggcttattcagcaccagaatatggtcgtcttcatacaaaatgacgtccgccaacgccgccactttttgcaaatgcggcgacacggcctcttcttcgcgttcagcaacgcgaaccggcggaatgcggacttcatcgcccgcttccagtttgtattccggtttaatgcgttttttgttcacccgcacctcgcctttacgcaagatgcgataaatcatactttttggtacccctttcagttgggtgcgcaaaaagttatcaatgcgttgccccgcttcgtcagcggcgatagcaacaatttttacggatggcgtttctgttttcatggggggcgattctaaatagcctgtgagattcgcgccacacatttttctatgcttatagagacgtctacgccagtggatgaacatttttcactgcggttttgctggttattaaagcgattggctcgcgctggtgaaaaaactgtgagtaagcgggtgataaatggtaaaagtcatcttgctataacaaggttagcagtggaataatgatgcggtttccgcaccgaaacttgttaaaacaaaaagtttagcggaataacccattttgtctgaccgatcatcaacgcagcaatggcgtaagacgtattgatttttcagacagttagcgggctgcgggttgcagtccttaccggtagataggatcttctctggagagtaatgcccaggctgcttccctgataattgcgctgtgtttccgtatgaaatacaggcaaccgacactctgcgcctctttgagctgacgataaccgtgaggttggcgacgcgaaatagtcacgaggccatcggttcatgcccggtaaggcgtcaccatgcccgcagcttagtcgtcaacgtaagaataatgagtaagttacgatgaaaagaatgttaatcaacgcgactcagcaggaagagttgcgcgtcgcccttgtagatgggcagcgtctgtacgatctggatatagaaagccccggacacgagcagaaaaaagcgaacatctataaaggcaaaattacccgtattgaaccgagcctggaagcggcttttgttgattacggcgcagaacgccacggtttcctcccgttaaaagaaattgcccgcgaatatttccccgctaactacagcgctcatggtcgcccgaacattaaagacgtgttacgcgaaggccaggaagtcattgttcaaatcgataaagaagagcgcggcaacaaaggcgcggcgttaaccacctttatcagtctggcgggcagctacctggtactgatgccgaataacccgcgcgcgggtggtatttcccgtcgcattgaaggcgacgatcgtaccgagttaaaagaagcgttggccagcctggaacttcctgaagggatggggcttatcgtgcgtaccgcgggcgtgggtaaatccgccgaagcgttgcagtgggatttaagcttccgcctgaaacactgggaggccattcagaaagccgctgaaagccgtcccgcgccgttcctgatccatcaggaaagcaacgtcatcgtacgcgcgtttcgcgactatctgcgtcaggatatcggtgaaatcctgatcgacaatccaaaagtgatggaaatggcgcgtcagcatatcgccgcgttgggccgcccggattttagcagcaaaattaagctgtacaccggtgaaatcccgttgttcagccattaccagatcgaatcgcagatcgagtcagcgttccagcgtgaagtgcgcctgccctccggcggctccatcgtcattgacagtaccgaagcgttaaccgccatcgatatcaactccgcccgcgcgactcgcggcggcgatatcgaagaaacggcgtttaataccaacctggaagcggccgatgagattgcccgccagttgcgtctgcgcgacctgggcggcctgatcgttatcgactttatcgatatgacgccggtacgtcaccagcgcgcggtagaaaaccgtctgcgtgaagcggtgcgtcaggaccgggcgcgtattcagattagccatatttcccgcttcggcctgctcgaaatgtcgcgtcagcgcctgagcccgtcgctgggcgaatccagccatcacgtgtgtccgcgctgtagcggtaccggcaccgtgcgcgataacgaatctctgtcgctgtccattctgcgcctgattgaagaagaagcgctgaaagagaatacgcaggaagtccatgccattgttccggtgccgatcgcctcttatctgcttaacgaaaaacggacggcagttaacgctattgagacgcgtcaggatggcgtccgctgtgtcatcgtcccgaacgatcagatggaaacgccgcactattccgtgctgcgcgtacgcaaaggggaagaaacgccgaccctgagctacatgctgccgaagctgcacgaagaagcgatggcgctgccttctgaagaagagtacgccgagcgtaaacgcccggaacagcctgcgctggcgacattcgctatgccagatgtgcctccggcgccgacgcctgtcgaaccggcggttagcgtcgccacggcgaaaaaggataatgttgccgccgcgcagcctgcccagccgggtctgtttagccgcttccttaacgcgctgaaacaactgttcagcggtgaagaaacgaaagccgtcgaaacagccgcgccgaaagcggaagaaaaagcggagcgtcagcaggatcgtcgcaagccacggcagaacaaccgtcgcgatcgtaacgaacgccgcgacacccgtgataaccgtgccggacgtgacggcggcgagagccgcgacgataatcgtcgtaaccgtcgccagacgcagcagcaaaatgcggaagcgcgcgatacccgccagcaggaaacggcggaaaaagtgaaaaccggcgatgaacagcaacagacgccgcgtcgcgaacgcagccgccgccgcaatgatgacaagcgccaggcgcagcaggaagtaaaagcgcttaaccgcgaagaacagcctgtccaggagaccgagcaggaagaacgcgttcagcaggttcagccgcgccgcaagcagcgtcagcttaatcagaaagtccgctttaccaacagcgcagtggttgaaacggttgacacgccggtcgtcgtcgacgaaccacgcccggttgaaaacgttgaacagcccgttccagcgccgcgtaccgagctggcgaaagttgatttacctgtcgtcgccgatatcgcgccggagcaggatgatagcgtagaacctcgcgataataccggtatgccgcgtcgctcccgccgttctccgcgccacctgcgcgtaagcggtcagcgtcgccgtcgctatcgtgacgagcgctacccgacacaatcgccgatgccgttaaccgtcgcctgcgcgtcgccggaaatggcgtccggtaaagtctggatccgctacccgattgtccgtcctcaggaaacgcaggttgttgaagagcagcgtgaagcagatctggcgctgccacaaccggttgtcgctgaaccgcaggttatcgctgcgaccgtagcgttagaaccacaagcgtcggtacaggcggtagaaaacgttgccgttgagccgcagaccgtcgccgaaccacaggcgccggaagtcgtcaaggtcgagacaacgcatccggaagtgattgccgcgccggttgatgaacagccgcaactgattgccgaaagcgatacgccggaagcgcaagaggttattgctgacgccgaaccggtagcagaaaccgccgacgcgtccattacggtggctgaaaacgtggctgatgttgtcgttgtcgagccagaagaagagacaaaagcggaagcggctgttgtggagcacacggcagaagaaaccgttatcgcaccggcccaggtggtggaaaagccgcaggacgttgtctgcgttgacgacgatcataatcacgccagcgcgccgatgacgcgtgcgccagcgccggaatatgtgccggaaaccccgcaccatagcgactggcagcgcccttccttccactttgaaggtaaaggcgcggcaggcggacacagcgctacacgtcatgccagcgccccggcgacacgcccacagccggtagaatgatgtaaatgctgatacaaagccgaccgccaggtcggcttttttatgccccttacagggcgatgcctcaccccatggcgtcttttagtcactatgagatcgggcgggataatacgtacggatggcgtcgctacgggcgcgacaatatgaccactaactcaatgacgactaaaaaaatgcccgcgccggggtggatggcgcgggcagacaaaacatatccagtttcgtgatatgtttcaaaaagaggtgttaccggttcaactggaaaagcgacattccctgcatgtcggtaaacgttttataggacgcctgtaatgccgcctgttgcatgacgtaggaagaaatgaccgagttccagtccacatctaccaggttgctcatctgcagtttctgtcccagcgcacggtcgcttcccagtgaatccagcgtactgagttcgctcagttgcgttcccagttccgcacgaacggtcaggacgttattaagcgaattttttaagccgcgattggttttatcaatggcggcagcggctttttctttttccacgtcattgccttccaccggggtcttgagcgcggcaattgccgtatcgagcatgacaaacagattcttttcggagtctgagccatccggttccggcaccgcattgctggtgatgctattaaaaatttgcgctcccgtatggccaattaccatcgtgcgtgcggaatccacctgctgggtaacacttttctcgccgccatgataaccacctgtcgcctggtcgaatggcgccgcttccgttttatacccggcaaagatatagcgaccattgccgtcagtgctgtttgccaggttcatcagctgatcgcggatcccctgtaaatccgtcgccagcgacgcgcggtcatcgtcgcttaacgtgccgtttccggcatagacgattttttcctgcgcggtttgaatcgccgtcgtcacctgactgagtacgctttcttccagcgacactttttgggtggcaaacgtacgcgccagggcatactggctattctgcgcctgcgcctgagagagtactaccgcctgcgacgcggcgattggatcgtcagatgggttggtaacgcgcttaccggtagacatctgctcgcccagcttcatccattcggcctgagaattagtgatgccgctcatattttgttcgtacatcatctgggtactgatacgcatgtcatccttctcctttagcgaatattcaataacgcatcaaacagcgcattcgcggtctgcaatacttgcgcattcgccagataatactgctgataacgctgcaaattgccgtactcttcgtcgaggttaacgccggaaaccgactgttgctgtttataaagctgtttaaccacattcgcctgcgtggtgctgctggttttcagcgttgacgttttgttacccacatcgctgaccaacgtggcgtaagcatcgttaaaagttttgttgccgcccactacattgctgttttgtaagtccagcaatgcctgaccattgcggttatcgctgtcgccggtatccacgtcaggatcgagttttgactcagacgccatcgcaatctcggcttcattcgtcactttaacgttcatgtcgacgatagcattgctaaccggcttgagaagaaaactgtcgtttttctgtgcgccggtccctaccgtcactttcagaccgtcaatctccagttttccgtcagcatcttttgtcgccgtgaaggtggtgttatccgcagtgcgagtaacctgccagtctgtaccgtcaaaaacaatcttataatccgtcgcctgaaccttcgtgctatcgaccaccttagcggttagcgataccgttttatcggcattattactgttgctatataccaccggcgagccaatgctaaagaagtctttccctttattgccgtcggcgtcataacctttggtatgctgcgcgttaaacgcatcggcaaacgccaacgccaactggcccagcgtattacgagtctgatccagatcctgggaacggaacgtcagtagcccgccgagcgaaccggtgttcagcaacttttccggaatttcgatgttaccggcggcctcatcgacataagcgacagtcgttcgcgtcgggtcggcgctggagggaaccgccgccaactgacgcgccgtcgacccctgcaccagcgtatagccattggccatcgtcaggttataggtgccgccgtcctgtacactcacctcgacgccaacgatcttgttaagctcgctaaccaactgatcacgttgatcgagcaggtcgttcggcgatgcgcccgcgcctacgcccgtcatacgggagatttgatcgttcaggttagctatctgcttcgcgtaattgttgatttgcgccacgctggagccaatcgcgatattgacctgtttatcctgatcgcgcagatactgatcggtggttttgaactggtttaccagcccttccgctttaccaatcagcgcctgacgcgccgcaggatcttccgcattactgactaacgtttgcaggctggtaaaaaaactctgcaacgaaccagacagtgagctggatttatcggccagcaggttgtcgattttcgacatctgttcatagcgcgtggtcaagccgctgctctggttttgcgcgccgcgtagctgattagtgataaacgcatcatattcgcgctgtacgcctgaaacgtaaacgccattacctatccagccgccagcccctaacgtactgtttgcctgcgccagaatagttgtctgccgggtataacccgcaacgttataattgttgatgttattactgaccgtatttaacgcggcctgcgcggcgttaagtccgctcatggcgtgattaatcaagctggacatgatggttccttttaatccttcaatactcgttgttatcggcagcgactacgtggacttgagcaatttaaaagagattgtcgagattcgcgctgtaggttttgctgaccttttcactcatcgctttcaactgctgaatcatgctggtcaatttacgcgcgtaattcgggtcagtggcgtatccggcgttttgcagagccactgcgccctgctctgccgtggcggcagtggtcacggcagcgtagcgtgggttacgcgctaacagcgcgacataatccgataatgcctccagatacgagctatagacgcggaatttcgctttcacttttttcgcttcgccattctcgtattcagtggtggtgatttccgtcaccggccctttccaactggcggtcgctttcacgccaaatacgttatagctgggttcgccattctcccgcaggatttgccgttgcccccagccggactccagcgccgcctgcgccagaatcagatgatgcggcaccccgctttgttcgctggccagcctcgccgggagcgaaagccgggccagaaagtctttactgtcgccggagagcggcgcatcgctgctgtccggcgttttcggtatggctttgcgcaccagttgggtcagcgcctgattttgatagctgtttaccgtctccagggagaatttaagcggtacttgcggcgcatcatccgcaggcatcgtctgcccgcccgtcatctgtttaaccatcatatccgccagccccaatcccttaccggcggtcatctgctgggcgatctgctggtcatacatgctggtatacagacgcgtctgatcgctgctgaataaaccatctttgggtaaagcctcgcgcatacttttcagcatcatctgcacaaacatcccttccacctgacgggccacaggacggatattcgccgccgggtcctggcccgctttcgctttcagttcgttcagagattgcgcatcccaggccgcgctggccagcaatttaccgtctccgatcatcagatgatttccagtttggcgcgtagacagcccgcgctctgcatggactgcaaaatcgacatcaggtccatcggcgtcgcgccaagcgcattcagcgcacgcactacgctgttcagattggcgctggaacgcacgctctgtagcgatccgccgctctgacgcaaatctatttgagtctgtggcgtcaccacggtctgcccgccgccaaatggcgtattcggctggttgacgttgagctggcgattgactgtcactgacaaattgccctgcgccacagcgcagctatccagcgtgacttcccgattcatgaccaccgaaccggtacgcgagttgatcacaacttttgcatcctgcggcgtcacgttgacttccatattttgaatgtccgccagaaaacgcacctgcgagctgttgccgctgggcacgcgtacctgtaccgttcgcgcatcaagcgcagtggcgctgccgtaaccgcgggcgcggttgatggcgtcggtaatttgctgcgccatcgtaaaatcttcgtcgttcaattgcagattaatggtgttgccagcgccgaactgagtcggcaactcgcgttcgataatcgcgccattagtgatgcgcccgccattaagctggttaacctgcacgctactgccgcctgcggaagcgcccgcgccgccgaccagaatattgccctgcgccagagcatacacctggctgtccaccccttttaacggcgtcattaataacgtcccgccacgcagacttttagcgttccccattgaggaaacgacgacatcgatcgtttgtccctgtcgcgcaaaaggcggatacgacgccgtcaccatcaccgccgccacgtttttcaactgcatgttggtgccggtggggaccgtaatccccagttgtgacagcatgttattcagcgtctgggtggtaaatggcgtctgggtcgtctggtcgcccgtaccgtccagcccgaccaccagcccgtagccgatcagcgagttttcccgtactccctggacactggtcagatcccggatacgctcggcgtgcgccagagtggcaaccagtgccagaacgattcctgcaagagctttaaacacatacacctcgcttacatcggcgacaaattaaggaagaaacgttgcagccagcccatattttgcgcttcgttaatatagccgttcccgacatattcaatccgcgcatccgccacctgtgtcgagggaacggagttgctgccgctgatggtgcgtggatttaccacgccggagaagcggatgaattccgttccctgattaatcgcgatctgtttttcccccacgacgtgtaaattgccattggccagaacctgatcgacggtcacggtcagcgtgccgctaaaggtattgctggcattcgcgccgcctttgccgttaaaagagttgccgccggaggcctccatatccgcgcgggaattaccgaataatccctgcagataacgcggtaccgtatcaaaaccaaaactggttttgccgtcgcgactggcatttgccgacgagcttttactggcgctgacgttttcctgtaacacaatcgtgagcgtatcgccgatattacgcggtcgacgatcttcaaaaagcggctgatagccataattaatcggctgcgcagactgaaatatggagccattcgccaccggtaccgggccaggtatcggctgcgccgtggtcgccccctgcacgagcggtttagcgggtatccaggcgcatcctgtcagcgtcgcgaccatcagggccataactgggtaagcgtgaagcgcgtatttttgcattaccttcatcttcaaaatcagggagccggtggcgtatcccccaccggcggccccttagagttgcgtcagtttctgcagcatctgatcggtcgtcgatactgctttactgttaatttcataggcgcgttgaacctgaatcatgttcaccagctcttccgccacgttaacgttcgacgtttcgacatacccttgatacaacaaccccgcgccgttgagccccggcgtgctttcgttcggcgcgccggacgattgcgtttcgatatagaggttctcgccaatgctttccagcccggtgtcgttcataaaggtggtcaggttaagctgcccgacctgaaccggcgcggcctgcccctgctgggtaacgctgaccacgccgtcgcggccaatcgtgatgcttaacgcgttggccggaatggtgattgccggctgcacctgaaaaccgcccgccgtcaccagttgaccattctgatccacctggaaagagccgtcgcgggtataggcagacgtaccgtccggcagcatgacctggaaaaagccctgccctttaatcgccacatctttactgttgttggtctgcgacaggttcccctgactgtgcagacgctccgtggcgaccggacgcacgccggtaccgatttgcagccctgaaggcagcgtcgtctgctcggacgactgcgcgcccggctggcggatggtctgatacaacagatcttcaaataccgcgcgctgacgcttaaaaccattggtgctgacgtttgccaggttattggcaatcacatccatattggtttgctgcgcgtccagaccggttttggcgatccataatgaactgatcataaaatgtcctgtattaactcatcgacagcagttggttagctcgcccttcgttctcatctacgctggtgataaccttcatctgcatttcaaaacgacgtgcgttggcgatcatgtcggtcatggcttcaaccggcttgacgttactgccctccagcacgcccgacataatgcgaattgacgggtcggcggccagtaccgccccgcgttcagcctgtgcctcggcggtaaggcggaataaaccgtcatcgctccgctgcacctcattgccttccgctttgaccagcttcagtcgcccaacgggcgccaccgtgtttggcgggtcgccgggattgagcgcggagatcgtgccgtctgccgcaatggtgatttccgacccttcaggaacggtaatcgggccgccttcgccgataaccggatgtccctgaatggttaactgcccggtcggacccacctggatattcccgttacgggtatatccttcagcgccatccgccgcttgcactaccagccagccgtcctgctgtaacgcgacatccagcggacgggaggtgtagtccaactgacccggggtcatatccgccccgggcgtcgacgccgtaaccagcgtgcgcgttgctaaagagaggccatcaacgggcaccgcgcgtagcgcgttaagctgcgcgcgaaagcccggcgttgaggcattagccaggttgctggccgttaccgcctgctggttaagcgtctggctggccgcccccatagcggtataaattgcgtgatccattaagctatcccgtcaggcgcttagcgcaggttaaccagcgtattgaggatctggtcctgagttttgatggtctgcgcattcgactggtagttacgctgcgcgacgatcatattcaccagctctttactcaaatccacgttagaggcttccagcgcgccgttcgtcagcttaccgaagttgccggaaccggcagtccccagcagcgcaaccccggaagcctgcgtcgccgcccagacgttatcgccctgggatgccagaccttcgttgttggcgaagttagccagcacaatctgccccagcacctgctcctgctcgttggagtagttgccaaccacggtgccgtcgttgttaatctggtagctcaccaggtcgcccggcttatagccgttttgattggtggcgacgatgttattagccccggtgttctgctgcatggagttaaggaagctgagggagaaggtggccgctgtcgcgccattaatcgtaccggtggtgatgttcaccgtaccgccagactccagaatcccgttttcattgaatttcagcgtagtggacgccgttgttggcgcagtggctgcaggatcgctgctgtcatgggtgtacacagcccattcattatctttggttttcacaaaatagacgttcatgtcatgggcattaccctggctgtcataaacggtgacggtgccttttttgttatacgaatccgcatcactcacgctaaagggcgttttagacggtacagggtccgttgagttcaggttgatctgcattgacgcggtggtggtcgatttcgccgccatcagcgtgttcggaatggtgatcggcgcaggattcgccccctgctgaatggtcggcggcgtaccggtggccggatagccggtcaactgcatcccctgcatattgaccaggttacggttctcgtccagtttgaactggccgttgcggctatagaacacggaaccgttgctgtctaccaggcggaaaaaaccgttctggctaatcgcgacatccagcccgcgcccggtgttcgttgtcgtaccgtcggtaaaatcctgggtaatccccgccacttttacgcccagccccactttggaaccggcgaacatatcggcaaatgatgccgtaccggacttaaagccataggtggcggagttggcgatgttattaccgataacatcaaggttggtggccgcagcgttcaggccgctaaccgcttgagaaaaagacatgactgactcctgataagtgtaagggcttagattatttgccgaacttcgtcgagtgtggtggtgccgtaggtacccagatccaacaggttgccgttactgcccttcgtcacgccctgtaccagagcgaattgcagcggctgcgccaccagttgcgttccgccattgctggcggtaatcgcaatgttgtaagaaccattcggtaccgttgttccgtccgtttgcttaccatcccaggtaaaggtgtgtaccccggctcgcaactcaccgatctccagcgtccgtaccacccggccatctttatcggtaatggttgccgtcactttgtccgcaggctgttgcaattccacgccaaacggcgtcgtggacgtcacggccccttcttccgcgcctttacccgccagaattgtggtgccaggcaccataacgccatgtccaatcagcgtggtcgcctgtagggactgactattatcgatttgcccggaaatagcccccagcgtcgtattcagtttttcaatgccgctcacggtactgatttgcgccaactgtgtcgttaactcattattttgtaatgggttagtcgggtcctggttcttcaattgcgcgaccagtaaggtcaggaaactgctttgcagatcggcagcgttgcttccggtcatcgacccgctgccggtcgtcgttttgacgcccgtgttggtcgggtcattcatatttacggcaatagacatacgcgcctcctttactggcctaatgtcagcgttttaagcatcatgctttttacggtattcaggacttcgatatttgcctgatagctgcgcgaggctgacatcgtgttgaccatttcgccgaccacatcgacgttgggcattttgacgtaaccattagcgtccgccagcggattgcctggctcataaaccagcttttccggtgcctgactttcaatcacgctggcgacctttaccccgccagtggcttgacccggcgcggcgtccacctgaaaaaccacctgtttggcgcgataaggctgtccgtccgggccggtgacgctatccgcattcgccaggttactggccgcaacgttcaaccgcttggactgcgcggcaagcgccgatccggcaatatcaaaaatgtttaacagcgccacgaattagtttcctccctgtagcacattcatcatgcctttgagttggctacccagaacggtaagccccatctgatatttgagactgttatccgcaaactgcgtacgttccctgtccatatctacggtgttaccatccaaagaaggctgatcgggtacgcggtaaagcagatccactgcgggagaagagaccgcctgggcgggaatatggtgagaggaagtcaacgttaacgcgacgccgccggtttcttcccgtccacgcaccatcaccttttttaactcactggcaaaatcaatatcgcgcgcctgataccccggcgtatcggcattggcgatattcgccgctaatatttcctgacgttgcgcgcgcagattaagcgcttcctgctgaaatcgtaaggcggcatcgagcctgtcgagcatatctcctccgcaaatggcaaaattcagccgacagcttaaatgccttcacgcgcgcgttatcgccggaataaacgcaaaatgcgtcgctatttattgcgttgatgcctgcttcacacgggtagaatcctgtcatgacatcaaccagggggaagtaccatgcaaacgttaaaacgaggattcgccgtggcggctttgctgttcagccccctgacaatggcgcaggacatcaacgcccagctgaccacgtggttttcccagcgtctggctggcttcagcgacgaggtggttgtcacgctccgttcatcgcccaatctgctaccgagctgcgaacagccagccttcagcatgacgggcagcgcgaagctgtggggcaacgtcaatgtggtggcgcgctgcgccaatgaaaaacgttatttgcaggtgaatgtgcaagcgaccggcaattatgtcgccgttgccgcgcccgtcgcgcgcggcggaaaattgacgccggccaacgtcacgctaaaacgtggcaggctggatcagttaccgccgcggacggtactggatatccgtcagattcaggatgccgtcagtttgcgcgatctcgcacccgggcagccggtacagcttacgatgatacgtcaggcctggcgcgtcaaagcggggcaacgagtacaggtcatcgccaatggcgaggggttcagcgtcaatgcggaaggtcaggcgatgaataatgccgccgtcgcgcaaaatgcgcgcgtgcgcatgacatcgggtcaaatcgtgagtggaaccgtcgattctgatgggaatattcttattaacctataattgtgtaaagattttgtcgcggctgccgatgagatattcaaccatgatggtagctggccgctacaacgtaaccctcgatgaggataaataaatgagcattgaccgtacctcacctttgaaacccgttagcactgtccagacgcgcgaaaccagcgacacgccggtacaaaaaacgcgtcaggaaaaaacgtccgccgcgacgagcgccagcgtaacgttaagcgacgcgcaagcgaagctcatgcagccaggcgtcagcgacattaatatggaacgcgtcgaagcattaaaaacggctatccgtaacggtgagttaaaaatggatacgggaaaaatagcagactcgctcattcgcgaggcgcagagctacttacagagtaaataagcgtatgactcgtttgtcagaaatacttgaccagatgaccaccgtcctgaatgacctgaagacggtgatggacgccgagcaacaacagctttccgtaggccagattaacggcagccagctacagcgtattacagaagaaaaaagctcgttgctggcgacgctggattatctggaacaacagcgccgtctggagcagaacgcgcagcgtagcgcaaacgatgacattgcagagcgctggcaggcgattaccgaaaaaacgcagcatcttcgcgacctcaaccagcacaacggctggctgctggaagggcaaatcgagcgtaatcaacaggcgctggaggtgctgaaacctcaccaggagccgaccttgtacggggctgacggtcagacttccgtctctcaccgcggcggtaaaaaaatttctatctaatcattgccggatggcgacgttgcgcctttccggcctgaatgccttgtaggcctgatagcacagcgctatcaggcactgaatttacgccgtccggcgaacaaactctttcactttaaagcccagcacggcaagcgcggcgaaataggccgcaatacccgcgatcactaccgccatcaaacgtagcaaacgccataacatcgacccttgcgaccactccggcataatatgcaacacgccgaacaatacggcggccatcaccagtacggaaatgatcagacgcatcaggaaccacatccaacccggttgtggcgtaaagatattctgtttgcgcagttgccagtacagcagcgacgcattgagacatgccgccagaccaatagagagcgacagcccggcgtgtttcagcggtccaataaacgccaggttcattaactgagtcatgattaacgtcactatggcgattttcaccggcgttttaatatcctggcgagaatagaagcccggggccaacacttttacgacgatcaagccaatcagccccaccgaataggcgattaacgcccgctgcgtcatcgccgcatcaaaggcggtgaatttaccgtactgaaacagcgagaccgtcagcggcttcgccagaatgcctaacgctaccgcgctcggcaacgccagtaaaaagcacaaacgcagcccccagtccatcaggcggcagtactcatcatgattgccgctggcaaagcttttcgacaatgacggcaacaggatggtccccaacgccacgcccagcacgccggacgggaactccatcaaccgatcggcatagtacatccatgagaccgagccggaggccagaaacgaggcaaaaatggtattgatgataagagagatctgactgacggatacgcccaaaatcgccggccccatctgtttgaccacccgcatcgccccggtgtcgcgaaagttaatgcgcggcagcaccagcataccgatctttttcaaatacggaagttgatacaccagttgcagcacgccgccgacggtgactgcccaggctaacgccagcaccggcggattaaagtatggcgcggcgaataatgcaaaaccgatcatgctgatattaagaaatgtcggcgcaaaagcgggaatagagaagcgattccaggtgttgagaatggcgccaaccagtgaagccagcgagatcagcagaatatagggaaacgtaatccgcagcagttgcgtcgtcagcgcgaatttatccgcagtatcggcaaaacccggcgcggttaccataatcacccacggggcggccagcataccggccaccgtcacgacggccaatgccagcgtcaacaggccggaaacgtaagcgacaaagatccgcgtcgcttcttcaccctgcttgctcttatattccgccaggataggcacaaaggcctgagaaaaagcgccttcggcaaagatccggcgtagtagattggggagtttaaacgccacaaaaaaggcgtcggtcgccatccctgcgccaaaaattctggcgacaatcgcatcacgggcaaagcccaacacgcgtgaaaacatagtcatcgagctgacggcagccagcgatttcaataaattcatttcttttgtattccagaccctggcgtaaaactcctgcatggctgatccatcgaccggataacgcaacttctgccgtatccggctgtatcaccgcgcctgacggcgacgttaaaacgtcttatcaggccttacagactccccacggtttgccattattcactgtgaaaagaggtattgtgtagagtgggcatatatacccgccatacttcgagctgcatgtgcgttagcttttctgcaactcgaattattgagggtatagtacctggattacgatgaattactaccgccagatgttacagagggttattcgctgatggcgtcccgccacagcgcctccacgacgcgctgggccaaaatcgcctgctcccccgccgtttccggaaccgtctgattttgtacgcagtcaatgaaatgccgcgcgcatccgacaaaaccacgctgttcaagcgtcgtttgccaactaggaatgggtttgatgagaataccctgcccgcgctcttcgcgccattcacgcatatccgtcacgtcatatagcccgccgtcggtgacggcctggaccgattcacgctgacttccggcgcgccggtgcatactggtggtaatttgtagtttgtcggcggaaaaatgatgttccgcatagcacatttcgccggactcgctggtgagcaacgtgccgctggcaaggcgcgcctcgccgcccgccagccacagagcggtatccacgacatgcagatagtcatcgagcaaagtaaaacgtaagtcgtgcggcccgacgctatcggtacgatgtttatccatacgcagtgacgccgcagtgccgaggcgcgtcttcagttcgcggtacagcggcgcgaaacggcgattaaagccaaccatcagcgtcaattttttttgcgccgccagcgccaccagccgttcggcatcacgtagattttccgccagcggtttatccacgcaaacatggacgccggcattgagaagttcgctgaccacggcataatggcttgcggtactggagtggacgaagaccgcatcgcagccggacgctaaattcgccagcgaatccacatacggtatgctccagctttcgcagatacgtaaggctttatcccgcgaaggagaccaggcgccctgtaacgtccatccggcggtgttggttaataccggcagccaggccttctgcgcaataccgcctaatccgacaatgccaatccgtaatgttctcacattactctcccaggtgagctaacaaagaatccagccgctgctttaactccgccacttcgctttccagcgcttcgacgcgcgactgaagatcgcccgacgcactttccggcgcagacgtctggagagacagttcatcgacgtcgccgcaaaaaaggtgcatataacggctttcgcgcttacccggttcacgcgccagacggacgacatacgggccgtcctcacgactggcaagccgttccagcgtggattcaacttccgccatatcgctgaattcatgcatccgcgacgcccggctacgcaactcgccgggcgtttgcgcgccgcgcagcagcagcgtagtgacaagcgccacttccgccgcgctaagtttcagatcgccaaattcggaattacagaagcgctgttcatatttggtgacgcgattgccaaacccgctgaccgtacgcaaaaagtggcgtttcaccaggttatcgagctgttcttgtacctcttgttccgtcaggttcatcaccggttcacggttggttttctgattacaggctgtcaccacgccgttgacggaaagcggatactgttccggcgttgtcacctgcttttccagcagacagccaatcactcgcgcttcagtggcggttaattcatatttcatcgttttctccctttgcctctcattccgtaagccgctcaacgccccggcgtccataacggcgtggttaacgccgtcaggacatggtcgcgccattgtccatcaatcaacaggtaatctttcgcatagccttctttttcaaagccaagccgcgccagcaacgcgccgctacgtttgttgtgcggcatatagttcgccatgatacggtggatatgctgagtgcgctgcatatagcgaatcgcagcggttaaggcttcaaacatcagcccttgcccctgccacttctgcgcaatggaatagcccagataacaggcatgaaaagaaccgcgcaccacattggaaaaattcgccacgccgataatttctttttcttccggatcaagtagcgcgaaatagaaggcggagccctgtttgtgaaattcaccgatcattcccagacgcgcctgccatcctgaaggataacaatgactttcatcacggaccggttcccagggttttaaaaaatgacgattttccgcgtaataatcggccagacgccaggcatcacgctcatgcactaaacgtaccaccagacgatcggtggttaagcgcacttttggcacgttactacgatagccaaacattctatacctactccttcctgtaacgtcttcagcacgccagtaacattactatacctgcgcaaccaggctctgtgaaaagcgcaaatcgtcattttttgaattgctgccacattttgatgaaaactctcgattaaaaaggacttttgataaaaaaatattgtcccgctaacggtaggaaaaaacgaaacgccgccgcagaatagaagacgctcatcttttatttcccgggaggggaaatgtcgcgcgtctcgcaggcgaggaacctgggtaaatattttcttctcatcgataacatgttagtggtgctgggttttttcgtcgtcttcccgctcatctctattcgctttgtcgatcaaatggggtgggctgccgtaatggtagggatcgcgctcggcctgcgccagtttattcaacaaggtctgggcatttttggcggcgccatcgccgatcgctttggcgcgaaaccgatgattgtcaccggtatgctgatgcgcgccgccggctttgccaccatgggtatcgcgcatgagccctggctcttgtggttttcctgctttctttccggtctcggcggtacgctttttgacccgccgcgttcagcgctggtggtcaaattaattcgtccggagcaacggggccgcttcttctctctgttgatgatgcaggacagcgcgggcgcggtgattggcgcgctgctgggaagctggttgctacaatacgattttcgcctggtctgcgcgacaggcgctattttgttcatattatgcgcccttttcaacgcatggctgcttccggcctggaagctatcaacggtcagaacgccggtgcgtgaaggaatgcgccgcgtcatgagcgataaaaggtttgtcacctacgtgctgacgctggcgggctactatatgctggcggtacaggtcatgttaatgctgccgattatggtaaacgatatcgccggttcgcctgctgccgtgaaatggatgtacgctattgaggcgtgtctctcgctgacgttgctctacccgattgcccgctggagcgaaaagcgttttcggctggagcatcggctgatggccggtttgctcgtcatgtcgctgagcatgctccccatcgggatggtgggcaatttacagcagctttttacgcttatttgcgctttctacatcggctcggttatcgccgaaccggcgcgcgaaacgctcagcgcgtcgctcgcagacgcgagggcgcggggaagctatatgggctttagccgtctgggattagccattggcggcgcgattggttatatcggcggcggctggttgtttgatatggggaaagcgcttgcgcagcctgaactaccgtggatgatgctcggtattatcggctttatcacctttttggctttaggctggcaatttagtcataaacgcacgccgcgccggatgctggaacccggcgcctgatttgatacctgtcgctatctcctccatactggtcagataccgacagtcaaatggaggagaaacgtgaagctttatatttacgatcattgccctttctgcgttaaagcccgcatgattttcggcctgaagaacatccccgttgaacttaacgtgttacaaaatgacgacgaggcgacgcccacccggatgattggtcaaaagatggtgcccatcctgcaaaaagatgatagtcgctaccttcctgaaagtatggatattgtacattatgtcgacaacctcgacggcaaaccgctgttaaccgggaaacgcaatccagccattgaagagtggttgcgcaaagttaacggttacgttaatcagctactgctgccgcgatttgcaaaatccgctttcgatgaattttctacccctgcggcgcgtcagtattttatccgcaaaaaagaagcctcatctggcagttttgacaaccatcttgcgcactctgcaggactgattaaaaagatcggcgatgatttacgtttgctggataaactcatcgtacagcctaacgccgttaacggcgaattatcggaagatgatattcatctgtttccgcttctgcgtaatctgacgctggtcgccggtatccactggccgacaaaagtcgcggactatcgcgataatatggcgaagcagacgcaaattaatttactctcctcaatggctatctaactcccgccaggcggcaaccctttcttgccgcctttttcagctttttctagtggcaccatgtccgctggcgcgacatgctgctttgtgtcaagattagggcacaggcaacatgctaaggaacgccatgaaaaagtttttttttgccgctgcgctggtagttagcggcctgttagtgggttgtaatcaacttacgcaatacaccattagcgaacaagaaatcaatcaagcgcttgaaaaacggaataatttctcaaaagatattggtctgcccggcattgccgacgcgcatatcgtattgactaaccttgtcagccagattggtcgggaagaacctaataaagtcacccttactggcgatgccaggctggatatgaattccctgtttggcagtcaaaaagcgacgatgaaactcaagctaaaagccctgccggtctttgataaagaaaaaggcgccatctatcttcaggagatggaagtagtagacgccaccgtgacgccggagaaaatgcaatcggtgctacaaacgctcctgccttatttaaatcagtctttacgtagctactttaaccagcggcccgcttacgtgttgcgtgaggacagcagtaaaggcgaagcgttagcaaagaaactcgcgaaaggcattgaagttaaacctggtgaaatcgttattcctttcaccaattgatttcggagggcgcgctcgcgccttttttttacgtgcaaacgaaaacgtttccgcttatcctttgtttccggcaaaaagactattcctcagccggagcttattaatgactgcaccatcccaggttttaaagatccgccgcccggacgactggcacgttcaccttcgcgatggcgacatgttaaaaacggtcgtaccctataccagcgaaatttatggtcgcgctatcgtgatgccgaacctggcgtcccccatcacgaccgttgatgcagcgatcgcctaccgccagcgtattctcgatgcggtgcccgccgggcatgatttcacgccgttaatgacctgctatttaacggattcgctcgatgccgatgaactggagcgtggtttccatgaaggcgtatttactgcggctaagctttacccggccaatgccaccactaactccagtcatggcgtaacgtcagtcgacgctatcatgccggtactggagcggatggaaaaactcggaatgccattgctggtccacggtgaggtgacccatgcggaggttgatatcttcgatcgcgaagcgcgttttatcgacaccgtaatggaaccgctacgccagcgtctgaccgcgcttaaagtggtctttgagcacatcacgaccaaagatgccgcgcagtatgtacgtgacggcaacgactacctggcggctaccattacgcctcaacatttaatgtttaaccgtaatgatatgctggtcggcggcattcgtcctcacctgtactgtctgccgattctgaaacgcaatattcaccagcaggcgttacgcgaactggttgccagtggttttacgcgcgccttcctggggacggattcagcgccgcattcacgtcatcgtaaagagactagttgcggctgcgccggttgtttcaacgctccctccgcccttggcagttatgccgccgtgtttgaggaaatgaacgcgctggcgcactttgaagcgttctgttcactgaatggcccgcaattctatggcctgccggtgaatgcggggtgggtggaactggttcgcgatgaacaacaggtaccggaaaatatcgcgctggctgatgattcgctggtgccttttttagcgggtgaaacagtacgctggtcagtaaaaaaataaaaaatgcgcttacctgttgctatatattagatttaactgtatatatatccagtatattcaacagggggccattatgcgtattgaagtcactatagccaaaacgtcacctctgcctgccggtgcgattgatgcgctggcgggcgaactctcccgtcgtattagccatcattttcctgagaacttgggtaacgtcaccgtgcgttacgctaccgccaacaacttgtccgtcattggcgcatcaaaagaggacaaagaacgcattagcgagattctccaggagacctgggagagcgctgatgactggttcatcaatgaataaaaaatgatatgcagtgatgtatgtttgccgggtcgccccggcttttttatttgcgcaactgatgaatatttcgcctgaccgtcaaaataattgcacaacatcctaaaaaaatatgaatgaactgccgctttattgttcatataattcttaaaaagagaaatttatcctccggtctctttaaaaacgcagtgaatagccttattaattggtatactgaagttgcttcagaagaaaaacacgcattgaacctcgagaaccgttgtcttataacacgtaccaggggggcatgatggaaaagaataatgaagtcattcagacccatccgcttgtaggatgggacatcagcaccgtcgatagctatgatgcgctgatgctgcgtttgcactaccagaccccaaatcgtccggaaccggaagggactgaagttggtcaaacgctctggttaacgacagatgtagccaggcaatttatttcaatattagaagccggcatcgccaaaatagaatcaggtgattaccaggaaaacgagtatcgtcgccattagcgtgacgcgctccccctctctcaggcaccgtaaggtgcctcacttatttctggcttgtatatctcagcgcagttatttaccctgaaatcatcgcgatagcagagagaagctgatgaaatacgaccttattattatcggcagcggttcggttggcgccgccgctggttattacgccacccgcgccgggctaaaggtcctgatgaccgatgcgcatatgccgcctcatcaacagggcagccaccacggcgatacccgtcttatccgccatgcttatggtgaaggcgaaaaatatgtcccgctgatgcttcgcgcccagacgctttgggatgaactctccacacacaatgaagagcctatttttgtccgctccggcgtcgtcaacctcggcccggccgattccgctttcttagccaacgtcgcacgaagcgcgcaacagtggcaattgaacgtcgagcgcctggacgcgacggccctcatgacgcgctggccggaaattcgcgtgcccgataattatatcgggctgtttgaagctgactccggttttctgcgcagcgaattagccattaccacatggcttcgtctggcccgagaggctggctgcgcacagctattcaacagccaggtaagccatattcatcatgatgataacggtgtgacgatagagacgagtgaaggcagctaccacgccagcaaggcgctaattagcgcgggcacctgggtcaaagcgctggtaccggagctgcccgttcagcccgtacgtaaagtttttgcctggtttaaggcggatggacgttacagcactaaaaaccgctttccggcctttaccggcgaaatgcccaacggcgatcaatattacggcttcccggcggagaacgacgagttaaaaatcggcaaacacaatggcggacagctaatacaggctccggaagagcgcaagccctttgccgccgttgccagcgatggcgcggaagcatttcctttcctgcgtaacgtactgccgggtatcggcggttgtttacatggggcggcatgtacctatgataattcgccggacgagaattttattatcgatacgctgcctggccatgagaacacgcttgtcatcactggactcagcggacatggttttaaattcgccccggtgttaggagaaatcgctgcggattttgcgttgggaaaaacatcctcctttgatctgacgccgttccggctttcccgttttagccaataatttgtcggccccgtaaaggggctgtttattaaggtaacctatgcgccgtctctttcattttctgatgaataatattcgcgaacatttcatgctttacgttattctttggtcactgctagcggtgatggatattgtttatctccttttcttctgattgcttttcattgacgctaactgacacttcctgaaaattcctcactttttatttcataacgttgaagcacgacaataatgccagttcctgccgttgcgcggttacaggagtgaaatatctcgaaacttctgaagctgaaccgcaaacaacatcaaaattattgaaataaaaataaatatcattcaaattcttatttataagttgcattcggcgcttttccacgccattttcattctctcgtgaaatattcattggtgtgtttatgcaatttaaaaatactccacagcgttatggcgtggtttccgccgcgctccactggctgaccgccctggtggtctatggcatgtttgcgttgggtttatggatggtcacgctcagttattacgacggctggtatcaccaggcaccggaaatacataaaagtattggcatattactgatgatggcgctgatcgtgcgtattatctggcggctttattctccgcctcccgttgcgttgaccagctattcccgcttaacgcgcgctggcgccgccgcaggtcatctcctcctgtatctcctgctctttgcgataatcattagcggctacctgatttccaccgccgacggtaaaccgattagcgtctttggctggtttgagattccggccacgcttacggacgcgggcgcgcaggctgacatcgccggaacgctgcatctgtggtttgcctggtcgctggtcattatctcgctctcgcatggggttatggcgctaaaacaccatttcatcgataaagacgacacactgaaacgtatgacaggaatgtcgtcatctgactatggagctcaaaaatgaaaaaaaacctgctgggattcaccctcgcatccttgttattcacgaccggttccgccgtggcggcggagtataaaattgataaagaaggccaacatgcgttcgtcaatttccgcattcagcatctaggctacagctggctatacggcacctttaaagatttcgacggcacgttcacttttgacgaaaaaaatccgtcggcagacaaagtgaacgtgaccattaacaccaatagcgtcgacactaaccatgccgaacgtgacaaacacctgcgtagcgcggagtttcttaatgttgcgaaattcccgcaggcaaccttcacctctaccagcgtgaaaaaagagggcgatgaactggatattaccggcaatctgacgctcaatggcgtgactaaaccggtgacgctggaagcgaagctgatgggccagggcgacgatccgtggggcggtaagcgcgcgggctttgaggccgaaggaaaaattaagctgaaggatttcaatataactaccgatctcggcccggcctcacaagaggttgagcttatcatctcagtagaaggcgttcagcagaagtaacgcctggcgaaatgccggatagcggcctttacgctgctatccggcaaaatattactcagccggatcgggaatgctcagtttgctattaagccgaccacgcgatttattaaaaattttattgccgttctcgcgacccgcgcgacgtcggcgctgttcttcctccggcaaggccaactcttcacagcattgttcactacagcagccgttaaatttactggcgcactgcggacactggataaacagcagatggcaaccgtcatttttgcagttggtatggctatcgcagggcgcgccgcactgatggcaatgcgcgataacctcatccgagattcgttcgcccattcgctcatcaaatacaaagtttttgccgataaagcgaacgggaagcccctgctcgcgcgcgcgacgggcgtactcaatgatgccaccctcaatatgccagactttattgaaaccgttgtgtttcatccaggcgctggctttctcacaacgaataccgccggtacagtacatcactatctttttatctgcatgttcccgcagcatttcaaccgcttttggcaactgttcacgaaacgtatccgccgggatttccagagcattttcgaaatggccgacttcatactcatagtggttgcgcatatcaataaagaccgcatcaggatcgtccagcatcgcattcacatctgccgccttcagataatcgccgacattactggcgtcaaaagtcggatcgtcaattccgtcagcgacgatacggtcgcgaactttcatacgcagcacccaaaatgactttccgtcatcctccagcgcgatatttaaacgcagcccgtccagcgcggggtcgaacgtataaagctgttgacgaaaggtctcgaccttgctttgcggcacgctgatttgcgcattgatgccttcatgcgccaggtaaacacgaccaaaaacgtccaacgccgtaaacacctgatacaacgcgtcccgcgtctgctgcggcgaggcgatagtgaaatatttataaaaagaaattgtcgtacgcggctcgctttccgccagcattttggctttcagctcgtcattagagatgcggttgtgtaacactggcatggtgtacgtatcctgcaatcagcaaaaaataaagtgggcaggcatgataaggcaagtctcgccaatttacatccacacattttgcgctacatttcctgctttacactaaataattaacaacaattgccgatttaatcgccactctcctgctacatatttttgctcaacgcaaaaagatgcgagaatacggggaattgttcgttgaaagacaggatagaaatgacgaagttgcctaaattctccgtggccttactgcacccgcgctattggttaacctggttgggtataggcgcgctttggttggtcgtgcaactcccctacccggtcatctataaattgggttgcgcattgggccacctggcgcgacgcgtaatgaaacgccgcgcaaaaatcgcctatcgcaaccttgaattatgctttccggaaatgaccgcgcaggaacgccacactatggtggtcaaaaactttgaatccgtcggtatgggcgtgatggaaaccggcatggcctggttctggcccgatcggcgagtgaaccgctggatggaagcgagcggtctggagcatatccgtgaagttaaggcgcaggggctggggttcattctggtaggaatacattttcttacccttgagtttggcgcccgcatgtttggtatgcataacccggggatcggagtttatcgcccgaatgataatccgttgctcgactggttacagacctggggacgcttacgctccaataaatcgatgttggatcgcaaagatctgaaaggcatggttaaggcattgaaaagcggcgaattgatctggtatgcgccggatcacgattacggcccgcgcgccagcgtctttgtaccgttattcgccgtcgaccaggccgctacgacctccggtacctggatgctcgcgcgcatgtctaaagcctgtattatccccttcgtgcctcgccgtaaacccgatgggaaaggctacgaactgatcattcttcctgcggaatattcgcctccgctggagagcgcagaagcgactgccgcatggatgaataagattgttgagcagtgcattatgatggcgccagagcagtatatgtggctgcatcgccgctttaaaactcgccctgaaggcgtaccgtcgcgctattgacaggattgcagccgtcaggctgcaatttttcccctcttttagctttaaaagctccccacattgcgaggctggtaaggtcggcgcataattataattagtacgctcataattaaattgatgatagcgcaaaccgcgcatcatactgtggaacgctatgtcaccctctgatgtccccataaactggaaacgcaatctaaccgttacctggctgggctgttttttaaccggcgcagcattcagtctggtcatgccttttctccctctctacgttgagcaactcggcgtaacaggccatagcgcgctcaacatgtggtccgggctggtctttagtattacgttcctcttttcagctatcgcttcccctttttggggcggtctggcggatcgtaaagggcgtaagatcatgctgttgcgttccgctctcggcatggccattgtgatgctgttaatgggcatggcgcaaaatatctggcaatttctgatcctccgcgcgttattaggcctgctgggcggatttattcccaacgccaatgcgctcatcgccactcaggtgccgcgccacaaaagcggctgggcgttagggacgctctctactggcggcgtcagcggcgctctgcttggcccacttgcgggcggtctgctcgccgaccattacggccttcgtccggtcttttttattaccgccagcgttttgtttatctgttttctgctcaccttctttttcattcacgagaatttcctgccggtgagcaaaaaagagatgcttcacgttcgggaagtggtcgcctcgttaaaaaatccccgcctggtgttaagcctgtttgtcaccacgctgattattcaggtggcgacggggtctattgcgcccatcctgacgctctatgtgcgcgaactcgcgggaaatgtcagtaatattgcgttcattagcgggatgatagcgtccgttcccggcgtggcggcattacttagcgccccccggctcggcaagcttggcgacagaattggcccggaaaagatccttatcgtcgcgctgattatttccgtactgctgctgattccaatgtcttttgtgcaaacgccgtggcagctcgcgctattgcggtttctgcttggcgcggcggatggcgcgctgctgccagccgttcaaactctgctggtttacaactctaccaaccagatagccgggcgcatattcagttacaaccaatctttccgcgatatcggcaacgtcaccggccctctcatgggtgccgcaatttccgcgagctatggcttccgcgccgtattctgcgtcacggcaggcgtggtgttgttcaatgctatctattcatggaacagcttacgacggcgcagactggcaatagaataatttttgcgctttcatacttgcaatattacagaatcagctattctttccctaaatacctcatcaaatcaaagggagacactgatgaccatgtatgccacgctggaagaagctatcgatgcagcccgggaagaatttctggctgaccatccaggcctcgaacaagatgaagcgaatgtgcagcagttcaacgttcagaaatatgtactgcaggatggggacatcatgtggcaggtcgaatttttcgccgatgaaggtgaagatggcgaatgtctgccgatgctgagtggtgaagccgcgcagagcgtgtttgacggcgattatgatgagatagagatccgccaggaatggcaggaagagaatactttgcatgaatgggatgaaggggaattccagcttgaacccccgcttgataccgaggaaggccgtactgcggcagacgaatgggatgagcgttaattactcataaggcccgtggtgaatatcgagcggcagtagcagtgtatcgaagatcagtgagaagggcagatcgaggatagtgatatagcgccatgcggaatcacgcatatcccactgcacgccagggtaatactggttgccgtgtccttgtccggggatcgttctgctgataatactgccgcagccgctcagggtaatcaccattatgctcaccgcgaatatacgcacctgatacctcatttcactataaaaataccggcatcacgccggtatttttcacctcactccagacctgaagaccttatctcgctgacgatgttcgtccctgcaacgcctgcggattcaggacgagagactgataatggtttacccaggaagagtatctctctggcgcattccagacccgatagtgtaaacgcgccattgtcaccggatcgctgagcaaaaccagacgccgatcgcggttcagtttctccggcgtttcgtttagcgcctgctccacatgacgatcgcgggctatttccagcaccttactggcgcggtgacgcgcagtggccatcgcggtcgccagcgcattaagcgacgggttaaataccgcatgcataaagccatcgtccagaatacggcggcgattcatctccagatatttatcggtatcgaccaacacctgaggcggcgaatactcttccgggatcaggaacagcttccagcgtttggtgcgtaatcctaccgttgaacgactggagatcaccgaaacaaatggcgacagaatcagcgaaaagacaatcggcgccagccagaacagaaagcgtaaatccagccacgccatacccaccgcccagaccagccccagcagcagttgagagccgtgacgcataaaggcttctccccacggcgtagaatcatcgtcgcgttgcggtgagttccagaccacttcccagccgaggaacgcgctgaccacaaacacggtatgaaacagcatacgcaccggcgccagcaacacggagaacagcacttccagcaacagcgacaacgtaacgcgccagaaaccgccatactctttggtgcctttacaccagatcagcataatactgagcagcttcggcaggaacagcagcaccatcgttgatgcaaacagcgcgattgccagttccggacgccactgcggccagaccggaaaaagctggcgcggctgaaggaaatattgcggctctgttaacgcatgaacgacctgcagcgcggtagaaagcgcgaggaacataaaccataacggcgcggacagatatgacattacccccgtcaggaacacggcgcgatgcaccgggtgcattcctttcaccaggaacagacgaaagttcatcaggttgccgtgacaccagcggcggtcgcgtttaagctcatccagcaggtttggcggcagctcttcataggagccggggagatcgtaggcaatccagacgccccaccctgcccgacgcattagcgccgcctccacaaagtcgtgggaaagaatcgatccggcgaacgaaccttctcccggcagcggcgccagagcgcagtgctcgataaacggcttcacgcggataatggcattgtgcccccagtagtgcgactcccccaactgccagaagtgcagcccggcggtaaacagcggcccatagacgcgggtcgcgaactgttggcagcgggcatacagagtatccatccccgacgctttcggcgaagactggataatcccggcgtttggattcgcttccatcaggcgcaccaagccgctcagacactcgccgctcatcactgagtccgcgtccagcaccaccatatagctgtactgattgccccagcggcggcaaaaatcgtcaatattgccgcttttgcgtttcatacggcggcggcggcgacggtaaaaaatttggccttcgccctgcacttccgcgataagctccatccacgccttttgctccgccacgcagatatccgggttataactgtcgctaaggatatagacgtcgaaatgcgcggcgttgcctgtggctttaacggactcccaggtcgcgcgcagaccggcgaaaacgcgactaacgtcttcattacagataggcatgatcagcgccgtccggtgttccggattgaggggctcatcgccaaccgtagacgcggagatgctgtacttatcgcgcccgataagcagttgcaggaagcccatcagcgccgtccagaatccggctgacacccagcagaacagcacggcaaacagaatcaggataccggtttgcagcatgtagggcaggagctgcataaaagagacccaaatatcctgccccaccatatccataggattgatgagcgcccatccctgataaggcagaatggtcttcatataccaggtcgcgacgacggtttgcgccagagtcaaaattaacaaaatatagcggcgtatagtgccgacggtacgccatttttgctcgctcgcctgctcttcttttgtcagacgagaaacatagcgcggcgttacatcccgcccacgcagacgatcccagaaacggccaaccgggttggttcgccagggatcgggaaacatcgaagagcgcgtcgcttttggcatagcctgcaactgatcgcgcccttcatcatctttaattaactgccccttcgccaatgaatccggccaggcgtgttcaaggcgggcttttacggaaccctgcggtgaatcgtcttctcgcgagtaagtccgatgctcggcatccagcgcctgatgcacggcgcggatgtcagttttcggcaatgccgctttctcacgttcagaaagcagcagtgcgtcaatatactcagttgttttattcattggcaggtaactggtagctccaggtttcacttagcgtctgatcggcattcaccaatgcggcacgcatttccgtggttttcttcgcgtctttgactttcacgcgcagcattaaacgccagcctttagtgactgggttatagcgtacattactgtcaacgatttcaccgttatcgccaatgctggtttgcgcagcgacaggcgtatccggcggcagttttttcatgtcggcgccaacgaaatccaccacaaaggcaatagtgccgtcgggctggcgaatcagattcgactgtttaacgtcgcccgttgagcggcgtgtttgcagcacccaggcattatccggcgcatgaagtttatcttcatcgcggctgaaggtcagagtgtacttgaagttcatctctttacccggttccggcagttgatccggagtccagtaagcgacgatgttatcgttggtttcatcattggtcggaatttcaaccagttcaaccttacctttgccccagtcgcctttcggggtaatccaggcgcttggacgcaggtcgtagcgatcgtctaaatcttcaaagcgcgagaactcgcgaccacgctgcaacaggccgaatccctgagggttttccattgcatagctgctcacagcgaggtgttttggattgttcagcggacgccaaatccactcgccattacccgcatgaatggataagccgttcgagtcatgcagttccggacgatagttggtcgtcggcgacggctggtttggcccaaacaggaacatactggttaatggcgcaacgcccagcttgcccactttatcgcgcagatagacttttgactgcacgtccaccacggtatcgcggccaggaatgatcacaaaacggtaagcgccggtcgcgcgcggagaatccagtaatgcatagacggtcaaacgcttatcggtgggttttggacgctcaatccagaactcgcgaaagcggggaaactcttcaccagatggtaaggcggtatcaatcgccaggccgcgcgcagataagccatatacctggcctgcgccgataacgcggaaatagctggcgccaagcatactgacgatttcgtcgttcttatctttactgttgatggggtacagaactttgaacccggcgaagcctaaatcttttaccgtgtctttatcgtgctgaacattgccaaaattgaagtaatccgggctgtatttgattcttttgaccgtcgtcgccgtcacttcgttaatcttgaccggcgtatcgaagtacatcccctgatggtaaaattcgagcttaaaaggggtctttaagttgttccagtaggctttatcgctgttaaactggatctgctgataatccgcatatttcatgtcgcggaaaacggagggcaagttgcttttaggcgcctcatagcctttcccggctaaagattgagcttgttttgccacgtcatcaatactgaacgcccagctcgatgatgcgtagagcgttaacataatagctgcgcccaaccaacgcattttcatcatttgtcgtttatgtttcataataagtaagcacttccccctttgtgtgcttatatcgatccgatccattttaatggataatcaggcattacgacaactgaatccaggctttgttcagcgcgctggctcatggattaagcacctcccgcgcctgttttcactttgcgtgcttatcctggagacaggttgtcggagttggtgtagggttgctaccgaatgtaactataattcgccttatggataaggtgaaaaatctgagaatacgtgaccttatatgagctctgtacccgcgccgcgtgaatattttcttgactctatccgcgcatggctgatgttgttagggattccctttcatatctcgttgatctattccactcacagttggcatgtcaatagcgccacgccatcgtggtggctaactctgtttaacgattttatccacgcttttcgtatgcaggtgttttttgttatttctggttatttttcgtacatgttgtttttacgttatccgttaaaacgctggtggaaagtacgggtagaacgtgtgggtattcccatgcttaccgcaatccctttgcttaccttgccgcaatttatcctgttgcaatatgtcaaagagaaaacagagaactggcctacactctctgcctatgaaaaatataatacgttagcgtgggaactcatttcacatctgtggtttttactggtgctggtgatattaaccaccgtcagcatcgggatttttacctggttccaaaaaaggcaggaaacaagcaagcctcgtcccgccgctatttcactggtcaggctttcgcttatttttttcctgctggggatggcttacgccgctatcaggcgcattattttcatcgtatatccagcaatcctcagtgacggcatgttcaattttattgtgatgcaaacgctattttatgtgccgttttttattctcggtgcgttggccttcattcaccccgatctgaaagcgcgcttcaccacgccctcacgcggatgcactttaggcgctgccgttgcttttatcgcgtatctgctgaatcaacgttatgggagcggcgacgcctggatgtacgaaaccgaatccgtgattacgatggtaatggggctgtggatggtgaacgtggtattctcactggggcatcgcttgttaaacttccagtccgcgcgtgtcacctatttcgtgaatgcttcgctgtttatctatctggtgcatcatcccttaacgcttttctttggcgcgtatattacgccgcatatctcctccaacctgatcgggttcttgtgtgggctgatatttgtcatgggtattgcgttaattctgtatgaaattcatttacgcatcccgctcctgaaatttctcttttcaggtaaaccgccggtaaaacaagaaagccgcgccgcgatcgggtagttttccgcgcgcgggttcacagcaaccattccacaggtaaaattgccgccaaccgtaccagaactcgctgccagaaacgcgtagcgggttctttctttaacaccttttcctcttcttgctgacgatcgatccagttaattcgtccccagcgatccagccgcagttgccaggccgcatcgcgttggctctgcgtaaaacgcttatgaataagcgtcgccagcgtttcactttcaatgacaaagcccatttcggtatttaaaagcgttgaacggggatcaaaattaagcgacccgataaacaccttactaccatcaatactgaacgttttagcatgtaagctggaacctgagttcccggtgagtccgcgatcatgtacggcggtttcatgttcgcgggtcggtttcagttcgtagagctccacgccatagcgcagtaatttcttgcgccagcgcgcgtaccctgcgtgaacgaccgccacatcgttggccgccagagagttagttaagatggcgatcttcacgcctttcctgaccagattaagcaactgcgccacgcctgcgcgcgtagggacaaagtaagcggaaataatgtcgatacgctccgtcggcgaccccatcacgtcaaataatcgctgcggaagaagcgaatggcgctgcgccttcccctcgcctttagaagggtcatcgctaagcaagcgtgtttttgcccaaatcagcggcaacgttccgcgatcgagatccgccataaactggctggtttccagcttatgcagataacggcgggtgatctcatcgttataccaggattcgggaagttcgatacgctgcgtcagttcctgctcagaaagggataatacttgctgcaatgtcgacactgaactacagcgccagtaacgttcaaaatcattggcgacatcattgaccaccgggccaatggccatcacgtccagatcggaaaatagcggctcctcgccagcgccgaaataggcatcgccgatgttgcgcccaccgaccagcgtcactacgccgtcggcagtgtaacttttattgtgcatccgccgattcagccgcgcaaaatccgtcaaatatcccagcgcgcgtagcgtacgaaaagagaaaggattaaacagacgaacttcgatattaggatggctatccagcaagcgcaacgtatcatccagaccaggcgtattgttatcatccagcagcagacgaacatgaacgccgcgcttcgccgccgacagcagtaccgaaaagagcagtcgcccggacatatcgtcttcccaaatataatactgcacatccagcgtccgcgccgccatttcggtcaggcggtagcgggcggcaaaagcgtccagactgttatccagcgcgagaatgccgcactctccgggatggcgcgcgcatagcggttcaacggcacgctccaggcgtgttttatcaggcagggtcgtcgccttgctgagtaagtaatcttgcgtaaagccgggcagtttcttcatcataacagacaaagtatacctgttcaggcagagcgtaacgggtaataaaatctgaaaccgtcctgacggcgacttcagcggcctgggcgcgtggatagccataaacgccggtactgattgccggaaaagcgatggaacgaaagtgattcgcctcggcaagcagcaaacaattccggtatgcctcttcgagtagctcagcttcctggtgttcgccgcctcgccagacgggccccactgtgtgaataaccgcctttgccgaaagcttgccagcaggcgtgataaccgcatgtcccgtctgacattcgccctgttgctgacggatgagtttacaggcgtccagcaatgccggccccgccgcgcgatgaatcgcgccgtctacgccaccgccgcccattaatgatgcgttagcggcattcacaatcgcatcgacgctaagttgagtgatatcaccctgtatgacctgaagacgtgatgtcataacccccccttttgtctcaccttatctgcaaagtgtacagcagggctttcaacagagtcgctctttttatatctatgacaccgccgttaacggtactcaatattcatcaccgccaggcttttttgcgcatcgagataatgcagcctcaccgtcgcaatggactgaatatcctgcggtaatccagatgcctgccgaaggtcaatccggtgcatttgctttttaccttcgcgcaggcaggttaaatcaatattttcggcatgagtagaaatatcgcacagtggctcaacaatcgcgccgcgaaaatggataacgccgccctgtaccgtttgttgccctaccgcagaatggataaaaaaagcgcagatacacaggcctatgccagggatatttttcttgattacggacatgttaactcctcaatgatcagtcatcctcgagggttcggcgttaccttatagcgacatgccgagacgatgagacgcttttatcgcctctttatacccaggtcagccaatccatttccgccaccatcaaaaactactgtgcagaaggcggccattgttgtgataaatgcagtgattgtccgtccgaaacagtaacaataattttaaccgagtcctctgaagatatatttacactaagacgagacaactcaatcggttgattagcaggtaaagatagcgtttgtttttgctgtgtatggctttgtcccccgacgccgtcgcgcacagagagaatttgcacctgacagacgcagggttcgtttaatgtgacctgagggatcaccgtgtaaatatcgccttgctgagtcgtggtaaacgtaatctgatttgaaagtgcggcaaggagcaataaagtatgcataatttcctcccgaaaaaaaacagggcttatgccctgtttttttattagcgcagacgctaaattaatactggttagccgtggcgttgttgccaaaaccaacctgacgcaccattacgctggaatcagatgcggtctgattaaccagcgcggcgttattaccgccgtattggccgacagtaatatcggagtttttagcgttccactggtcgatggtggcattatttctgaaaccattctgagtcagttcaatagtactattatccgcaccctggcctacatcggcgccgttaccataaccgctctgggtaatggtcgtttcagatttacgggcatcgctttgcagagcaagcgcagcgttagcggaaccgtactgataaatgctcaacgttgagtccgggccggaactattgccgccgccgttatgattaccgccgccgccccattgtggaacgacgccagccagagcactgccagaaactacgattgctgcgaatgctgccacttttaaaagtttcatggtaaaacccccatcggattgatttaaaagtcgtaacggtattagcgttgggtgacgcgaatagccatatgcgactgtttctgcactacaactgctgttttctgcgtaccgtactgggtaatattggccttatttccagaacctttctggataatagctgcactattaccgtaagcgctttgcgatatactggcatcgttggcattgcccgtttgctcaatatacgcaaagttataattccctgcctggtcgactttcgcccgattatttcctccttcttgtgaaataacggacaatagttttgatccttcctggcgtactctggcactattatccgtgccgacttgaccaataatggccgcctgattaaatgaagacttgcttaattcatttaccgcaaaattatattctgaacgagccagatcataatttgtcgcggttgcaatcccaggcgcacccagtattgtcaacatcataaataacaatttgtttttcatgctgtcaccctggacctggtcgtacatagcgaaaattatctattaccttgttagcgacatgcgttttttgttaacgcgtcgttacgatgaagagtatgtccgtggaaaaatttttaataactcacccacgcgtggtattttgttatttaagctcataccaaagtgctaataaaacgatagccatgtgattttttataattgatttttggccatagaagatagtgtatcgcgaacccaaaaaatgaagtgttggtgtgtgttatgccgccatggggatgttcttatgcttcctatggggggcaatacgcacaagacgtgacacacttcgttttttttgtctttgtgctgtccaggttaatgcctcgtctcaaattttaagaaaaaataaaatcaaaacatgacacacaataattaaaatgattaaaaatcaatgaattattataatttgtatgattttttaaatctatgcaataacagcgaaatgtacaactttactatcaaatctaaacttcaaaaaaacccaaaaacaacattttaatatatatttttacatcttgttacaagtttaacacttgctttaagatttgtaatggctagattgaaaacagttaaaagtattttcgtaaatatttttctctttctggataatgggctatttcaacccacagcagtgcaacatctgtcagtacttctggtgcctttattttatgggggcagctgtcagatgtgcgattaaaaaaagtggagtttcatcatgtttaatgaagtccatagtagtcatggtcacacactattgttgatcacaaagccatctctgcaagctacggcattattgcaacatttaaagcaatcgctggccataaccggaaaactgcataatattcaacgttctctggaagatatctcagccggttgcattgttttaatggatatgatggaagcggataagaagcttatccactattggcaggataatttaagccgcaaaaacaataatataaaaacattattgttaaatacccctgacgattatccctaccgtgaaattgaaaactggcctcatattaacggcgtgttttacgccactgaagaccaggaacacgtggtcagcggattacagggtattctgcgtggcgaatgctatttttcacaaaaattagccagttacctgattacgcactcaggaaattaccgctacaacagcaccgagtccgcattactcactcatcgcgaaaaagagatcctcaataagttacgtattggtgcctctaataatgaaatcgcgaggtcgctatttatcagcgagaatacggttaagacacatctttataatcttttcaaaaagatagctgtcaaaaatcgcacccaggcagtttcatgggcaaacgataatctcaggcggtaaggccatgaaacgctatctgacctggattgtagcagcagagttactgttcgctaccggaaacctgcatgccaatgaagttgaagtcgaggttcccggattgttaaccgaccataccgtctcttcgataggacatgaattctatcgtgcattcagcgacaaatgggaaagcgaatacaccggcaatctgaccattaatgaaagacccagtgcgcgttggggaagctggatcaccataacggtaaatcaggacgttattttccagacctttttatttccaatgaaaagagacttcgagaaaaccgtcgtcttcgcattagcgcaaacagaggaagcattaaatcgccgacaaatagatcaaacgctattaagtacgagtgatttagcgcgtgatgaattctaaaacatgatttttatccggaggctgtcatgcgtgttaaacatgcagtagtgctgctcatgcttttttcgccattaacctgggctggaaatatgacgttccagttccgtaatcctaactttggtggaaaccccaataacggttcctttttattgaatagcgcccaggcgcaaaattcatataaagaccccgcttatgataacgattttggtatcgaaaccccctcagcgttggataactttacgcaggctattcaatcgcaaattctgggcggcttgttgaccaatattaataccgggaaaccaggacgtatggtgaccaacgattttattatcgatatcgctaatcgcgacggacagctccagctcaacgtcacggacagaaaaacgggaagaacctcgaccatcgaagtgtcaggtttacaaactcagtcaaccgatttttaagctacagtcactaaaggatataaatcatgccgcgcttacttattttggttgccgttttattgttgagcggatgcttaactgccccgccgaaacaagctgcgaaaccgacattaatgccccgcgcacaaagttacaaagatttgacgcacttacctgctcccaccggtaagatctttgtttcggtatataacattcaggatgaaacgggccaatttaaaccttacccggcaagtaacttttctacggctgtgccgcagagcgccaccgctatgttggtcactgcgctgaaagattcgcgctggtttatcccgctggaacgacaaggcttacagaatcttttgaatgaacggaaaattattcgcgcagcccaggaaaacggcaccgtggcgatgaataaccgtatcccgcttcagtcgctgacggcggcaaatattatggtggaaggttctattattggttatgaaagtaacgtcaaatccggcggggtcggcgcaagatatttcggtattggcgccgatacgcagtatcagctggatcagattgctgtcaacctgcgcgtggttaacgtcagtacaggcgagatcctttcttcggtgaacaccagtaaaacaatcctttcctatgaagtacaggcaggcgtgttccgttttattgattaccagcgcttactggaaggcgaaatcggctatacctcgaacgaaccggtgatgctgtgtctgatgtcagccattgaaaccggcgttatcttcctcattaatgatggtatcgatcgcggactgtgggatttgcagaataaagcggacaggcaaaatgatattctggtgaaataccgtgagctgtcagtaccgccagaatcctgatgaatacgacaaagcgtggggaagaaccccacgcttttttattttgtgaccgccgtattcgctgaatgttgctcgcggcgtgatgccagccatagcccactatttttcatggcatagccaaagattagccccagcgccagcgacggtaataccaaccgccagtcaccctgccctgcaaatgtcgcgcaggcgccgataaatgttcccggaacaaaagaaagcaatagctgctttgcctggatacacatcaggaatgccacgatccccgtcaacacgtaactgacaatttccagatgcggcgccaacgcgctaccgtgaataatgaccagcgcccacaccataccgcttaacagcgtacagacggaaattaacaatcccttaaagccgccctgcggacaggcgaaataagccgtacaacctaaaaaaccggcccagcttagtaaccccagggagacggccacccatccccatattccagaaaggatgcccgtcgtgatagcaatagaaagaagtatgttcatggcgcgcatcataacagaaaagcggcgcattaatgagatcacgcacacattttatgcaatgatgtaaaaccagttgcagttaagggtgatttacatcacattattcttcatcttcttcctgaagttcatcccacatggcccctatcgcatcacgcgttagcggcgccagagtgcgccagaatggcgtaacggcatgggcttcaactttaccgaggaaggtattgcaccagggaagcagataatcggcaaataaggtttccagcgcttcactttcatcttcggcagactgatcttccagccaggaggccgcgagcaataaagtgccaatgtgatcggcaggcgtatcggccagcggcatccctcgcgacgttaaaaaagcgcgcacctcagactcttccgcgccttcgacccacgcactgcggtatggcgctaccgcgcactcttccccaacaaataacgcattgtaatcagtggaaatctgcgtgatatcgcagcttttctgtaaacgcgccagcatgtcatcctgctccagcggccagtttgccgccagtttaccttcacggattaacgtaaacagcggaaccagtaaaggatcttgcggttggcggtaaaacaacgatcccagcacacggcacaggattgaaaactcattcattgatatcttcccgtaaataacgattaaagttcggcaaattccggtacaggcgccataccgcgtgattcgagaaaggccagtaagcgctgcggagagacgttcaggattcgatcttccggaaaattcaccgcatccagaattttccggcattcggtgaaatcgccaagcgtaaaggccgtatgggaatcagagcctaacgctacccagcctcccgcatcgcgtacggcggcagcgaccgcgcggcaattatcttcgcttcctttacgcgaatgcagaaaagaagagttgttgatttccagcgctacatggtgtttcgccgccgcctgcgcgatggctttaacctccactggatactttggatttccggggtgactaattatatgcaccttgccgctggcgatggtcgcgatcatcgcctgggtattggtttctttatcatgtggcgcaaaaacgggctcatggaagcctgcgataatcagatccagcgagtcgaacatctttccggaacaatcaatttcaccgttaatgttcttgatattcgcctcaatgccacgcagtatccccacgccgtcaaccagacgcggccagatgcgcatgttaataaaatgccagtgatgcggcgcatcttccatgtccggaccatgatcggtaatcgcaaaaagtttaatgcctttgcgtttggcttccgcgatataatcgctcagagtactgtaggcatgagtgctggcgacggtatgcatatgcaggtcaacgggatacattgctctctcctgtagtcatttccgacaaggatagcaggtatcgccagcgttttttagcgaaacccggcccgcgccgggttgatgtcaatatcctctcgcccgatccacctgccccgtcaccggctctcccttctccagctgggtaatggtgcggctaatataatcgatggcttccgctggacgggtgactgccgcaatgtgcggcgtcatggcgactcgcggatggcgccataatggactttcctgcggtaacggttcctggctaaagacatccaacatcgcgccttttagcttaccgctatcaagcgcagccagcagatccgcctcctgaacatgcacgccgcgcgcgagattcaacacgtaagcgccatccggcaattgatccaacaattcgctattaataattcctaccgtttgggccgtattcggcagcagattaatcagcacccgcgtctggttcaggaaagcgtgcagctcttcacgcccaacataactttccacgccaggccaggatttgcggctacgactccagcaacgtaacgggaacccccacgcctgtagactttctgccacttttgcgcccagtacccctgcgcccatgataccgacgctaaactcttcgcgggtatattccggcaacggtttccatagcgcctgatttttcagcgcctgataatcatcgaaacgacggaaccagtgtaatacctgacttacggcatattcctgcatttgcaggcccattccggtatcttccagacggaatagaggaatggaggcgtccagcatttccggatgcgcatttaatttactcagaattgcatccacccccgcgcccagcgcaaagacggcttttaagcgtcttccggccagcatttcaaccgggggctgccatacaagcgcatagtctgcggggttgttatcaccgaccttccattcacgaacgcgcgcatgtgggagagccttctccagcgcatttacccaccaggcggtgttaaatgtcgggtgataaaaaattatctccatgttatctcctgagcagtattgtgcggaatgtgattgcgcctgttatcagcgttttcaacgggatgtgcagcatagcaaatttcccggcgcgggcaaaaaaagcagttttcgcttattaaaaccacagattggtggaagtttgtataaacgcgcttttttttaaaaaagttgattgacgtagaaaagatatttccctacattagcgcccgttccagtaatgctggagcgacaatttggtgaggtgtccgagtggctgaaggagcacgcctggaaagtgtgtatacggcaacgtatcgggggttcgaatccccccctcaccgccatatctaagttgagagcctgtacagaagtacgggctttttgcttatatgtatcccccaaaccaaggggggatgagaaccaccgaccggggttcgacaactggcgcagccagttggacagacgacgagcttgcgaggagactgcccgaagggcgagcgcagcgagtcaatccccccctcacagccatatttaagttgagagcctgtacagaagtacgggctttttgcttattatgtatcccccaaaccaaggggggatgagaaccaccgaccggggttcgacacaaaaacgccgggagcatttttgaacagagcttgctctggccccgaaggggcgaggcccagggatgggctgagtagcgtcgcagccagttggacagacgacgagcttgcgaggagactgcccgaagggcgagcgcagcgagtcaatccccccctcaccgccatatttgatacaaaatcaatcgattacaacgtaatattggttttgtcctgcataaaatactgcataaagaagctcgtgtaaacggactttttttgcatcttaacctcttgtttttgctgtgattttcctgatgaaaggtttatttttggacctttggctgctatgggaaagttgctgtagattgtgaaaaaacagccccattcccctacctgaaacgctttagaaaagtttgcataagtatctctcggtagtaaaaagcaccgagttcctctgcctgatgctgctgttgctttattagaaggcttaccgcgtttgaaagataacaatcaagtatcccctgcccctcgcgcttgaccttccccctgtaaacagtatcagtctaaactgaagtttccagtctttcttccatctcacagagagccgcattgtcatgaaaaagacccgttataccgaagaacagattgcatttgccctgaaacaggctgaaaccggcacccgcgtcggggaagtctgcagaaagatgggaatttctgaggccacattttacatctatggactacctccgttttgcaagtactgaatctggttttggcttgttgcttacatctatccggcatcaggaaaatctgtgcccaaatgggtagcctcaacaactggacggcctctgaggccagtataaaaatcaggttccgattgtgcaggtgcaacctgtcatcatttctcagtacgctgcaacttttgctggcaagggattaattacacactacctgatacccggtatcatttctcagcatcgaccagattattctcgcgtttttgttagcgaccgccacggtcgttttattaaatccgcgccgttcctttaactggttaacccactgattcatatgaccatcattgttattcgtggcaaccctgacgacagcgcgggcaccatgaataaaaagtgtccgcagatgcttgtcgccttttttcgtcatattcatcagcacctgcctgtcgccactcgaatgctggcgtggaaccagacccagccatgcagcaaagtggcgaccattcttaaattcagttcctttgccaatagcagcaacaacggccgtggccgttttaggaccaatgcctttaactttggcgatacgcggacaggcttctgattgcctgaatactgtttcaatttccttatcaaaaaaatggatccgacgcccgagatcgttaaagagatcatagagttcggcaattgttctgcgcatacgggaacttagaccgttttctgcatcttcaaggataagaggaatagcacggcgagctctggagacagcactgccaatggggatcccccggtcaagtaacagcccccttatttgacagactgtagcagtgcggtgattgacaatacgctgccttgcccggtgtaaagcctggatatcctgctgttcggggctttttggcggcacgaactgcattgtcggttgcatcagagccactgcgatggcctgtgcatcattaccatcatttttttgcccgcggacaaagggtcttacatactgaggactgatgacctttactttgtgccccagtttctcaaactcacgctgccagtaaaatgccccggtggacgcttcgatcccaatcagacatgcaggaatatttgccagcgtctggagcaattcttttcggccagtgcgtttcgtataaaccggtttgccggcctggtttaacccgcagagctgaaaaacatttttagccagatcaatacccagaaatacgatattcatggtgattctcctggtgagcacatttcgtacagttaaccgcagcgggaggaagtagtccatcccattaactggaagaaaaaatttgccgggccgggcgtgacggaactgcggcgtctgcggcaactggaggatgagaatcagcggctgaagaagctggtggctgacctgagtctggacaaggagatgctgcaggaggtactgaactgaccagaacaccatgataaacactgacaacaaattaaaagcgtagtatttttgatttgcggcaacaaaattaataagagtcatggtagctaaaaaaactctttttcttttcctgtacaaataagataaaaatcgcttcatccaccaccgcaagaatatgtatattatctgttattactatttcgataacacaatatcaaattaaatatatctctattacctatccattagtgtaattttcttaaactgaaaatttatcatttacagcccaaactcttacgcattttttcttttaatggctcggctacttctggacgtaattttgagtataaattttgtagattttcacagccagcaggttggcctgatgataaaggctctatttttgtcaggatattccacaaaatataaattgcaaatgcgattagcattatacttaaaaaacaaatacggataccccgagcattaaacaacgctgggacatttgatgcttcttgtttaacggatggcacataatttacgactggagcagtaacctcaggaataacaagttgttttccatacggaacgaagtattcagaaatatgctctgggctataatgctgttcaacacgtttccactcatctgacggaatgagtaagaacgataatgtatcactaaaagtgctgttctgatatacccgcaaactatatccactattagccaatatatgctcaatgcgcaccagttctgtatcaaaaccatcacttcccattgggtagtgatgaaacacatactgcgtatcaaccaaatttatcgttgctgtttcaatctcactgtcataatcgaatttgaccgtgacaggcttccctccctgattatctgaaagtgcctcaagcaggctaaaagtcccctctttccagtcaatattaattccgtagatactcataaacagcgcctggtagtcctctaatgcagactcagacagacacggttctttatgtttctccaaaaaaaacttacgccttaaagaggcttgttcatcatcattggcagcaaaaaaatcagaaaactcatcctgttctggtaattgcatcgtggttccatccaatattttattaatcaaaaatcgatcccagcagctaattttccctgctgtctatgatagaatagaatatgtgatctcaaagcgtcaagatgacaagaccaaacgagcacgcatccattcaataaatgaataaaccctgttaatacaaatagttttaaaaatgatttatctggacaactgaaattatctttatactgatagcagtacagccatttctgtaagtttaaatgacagataaaaacacggacaaatcgttttacgttatttccaatattttcaatgtctgccctctgtttttttacgtaatccctatgttgtcgcgacgggaacaataatagcgaattcgcgtatgacgttttaggggcattcataaaagagttttttgaaaacatgaagggagatgaacggaaaaaggttcgttaaggctggatgcgatcacgttcgcttacggcgaacgtaaccctttttacctggctgcatttttcttcttcttttcgtcctcaacatgcttatcaacaggtgagtcttttaagcgattgttttgcatgatgtcatcttcaagcgattttagatagcttgcatcagtcagcaaggctattgccagcgttttcgcataaaattgcgcgtggcttcgtgtcgtaggatttaccgcgtaggttctggcaagctcatgtccaggggaggcggtatcaccactgaaaaagatttcgcctcttttcctccatcctccagcaatccatttcctttaagataccctcacaggatccgtgtgaagcaacggcagttaaactgttttgtcaccagagatgtgagatgggcgttgcaaaagagtgtgagcttgtgagctaaagaagataaaagtggatgcccgacgcgcagcaaaatggtaaaaaacagcatcagtagtaagaaaaatcgagcgagtgaaagaaattttaatgcagggatttatgtatgacgaaatcaaaaacgctttgtcagtgattgattttgttgaatgattggcggagagagggggatttgaacccccggtagagttgcccctactccggttttcgagaccgtcccaatattcttatttaacattaacttatctaataacatgagaaaaaagtagcatttttgtacgcagtattttcagaaagttagcctacttatcaaaatcattttctcaccatgatagactattttttaaacaaaaccatctcctttattgacttcccacaacaacatgcgccataacatcttcgtggcatctggtggtttccgtccttaatcagttatgggattcctacaggttcaccggatgccacaaccttccctcatgcttctagttagcgcggtaatcccgttttttaactcccttccggttagccgataacagaatccagtacagcccgtgtatcgacagccccacatcataaataatcgctacctgctgtcgcggtattcctgccccaatcagacgcccggcctgcgcccattgctcaggtgataactttggtcttcgcccgccaatctcccctgtccccctgcaatacaataaaaacatatcgtataagaagtataaaatacttattcaaaaatgtaattttaagccccccctaaccaagtaaaaactatcgtttcagatagctatggcacgaaaatacggtagcaaatcttcatacaaaaatcttccaatttattaaactaaggttaaaacccgatatcttatcaatctcaaatcatggtatgttatattaatagcgtaagggttgaaaaatgttttctcgagtcagaggttttctttcatgccagaactattctcatactgcaactccagctattactctgccttcatcaggtagtgcaaactttgccggagttgaatatcctttattgccattagatcagcacacccccctactttttcaatggtttgaacgaaacccaagcaggtttggggaaaaccagatcccaattattaatactcaacaaaacccctatctcaataatattatcaacgccgctataatagaaaaagagagaactatcggggttttagttgatgggaattttagtgctggacaaaagaaagcattagcaaagctggaaaaacaatatgaaaatataaaggttatctataattccgacctggattatagcatgtatgacaagaaactatcagatatttatttagaaaacatcgctaaaattgaagctcaaccagcaaatgtcagagatgaatatctgcttggtgagataaaaaagagtttaaatgaagttttaaagaacaatccagaggagtcccttgtttcgtcccatgataaacgcttgggacatgtacggtttgatttttacagaaatctttttttattaaaaggaagtaatgcttttctggaggcgggcaaacatggctgccatcacctgcaacctggaggtggctgcatatatcttgatgctgatatgttacttacaggtaaactcggcactttgtatttacctgatggtattgctgttcatgtaagtcgtaaaggtaatagcatgagtcttgaaaatgggattatcgccgttaaccgcagcgagcatccggcattgaaaaaaggacttgaaattatgcacagtaaaccttatggcgatccatacattgatggtgtctgcggtgggctaaggcattattttaattgttctatacggcacaattatgaagagttttgtaattttatagaatttaagcatgaacatatttttatggataccagcagtttgactatcagctcctggagataattatttgcaaacgtatgatataaacgcgagcaatgtttcggcaaagctaaacgtaaagaccatactgacgatttcgatcgatatcgtggatgtgacgcgcgtacctccattaaattggatgacctgcgtgccgtggtgaaaatcactcatccggttaactccgtggttaaggggtgagtatattttcaggtcagtacacaagagggggctatttgtaccggctgtcaggttgatggcacaacgacaggaaaaagaaaaggcgggtaataaacccgcctgaatatttagcgtggtatatccggccagtcaggcgcagatgtatccaccctgtttaccattacgctataaagttcccatgcttccagccgtttaatctcttcatctgtggcaatttttagttttactgcccgtgccagtggtgcgatggctgattcagcctcagcaaggcggcgaactttttcagcctccgcctttttacgcagctcttccggagaataaccccgttgaacgactttaccgtcctgatataaccacgtaccatcaccacggcaatcatcagggcagtcagcagcgtctatttccgcaacagacatattaaccggccacaacattgatacagaatatgtgtttcctcgttgcgggactggcttattaacaacaccccagataaccccctcatggtcgtacattatttttgcagtatcatcagaaaataatgactgacactcataccagtcctgtccatcgtccgactccagaaaatatgcacctatatttatttcagcctgagttttatccctgtttacgggcgcgtcaataagtctgaaatttttgatattctgatattttttcattataccgttcccccttgtacggtataccactgactcccgactcgtttttgcaaaggcgcataattaataccatcaatattttcgccctgataatctttccagacggaggtaactacatatccgggagtgttaggccaggaacctgcattgttccaggtagtcactgatgtgccagcccctaactgaacatctaagacgagattattattaatccaggtacttaaccagccatttccccatagcgaaccaaagatgtcgccgttattctgatagatagccccgcttgcacgaagcgtgttagcggtgatatctccattgaccgtaaagacaatcgaaccgtcaggatttcgctggctgtacagatgccatccctgatcgtcgtccagttcaataactgttggcctgtttgcgtcgccccataaattaaacgtggctgtcattgtcgaattattattgctcgtcagtgacagtttttttgcgttgcctgcgcgtacggcaccattagtgagaacatctactgacatgtgcagcccggaattgtcgatataaccaaccagagcattattggcataaatccccagaacgccgtcactgtgccacttaaaccctgtatcgttatctccgaatacaatcgaattaccacccagcgcattatcagtaccaatgcctaacggaccgtttagcctccctccattaactgacagtgcctcaacgtcaccggctgtgggtttcatcagactattaaacagtgtatatgtctgaccgctggttgagtttcccggctgaactgatgaatattcaggcgtactgtgcagcgtgacatttgcattaccggtgtaatcatattgcgcaattaaccagtacgcatactggccgatattaatataaatatcgtaggtgtcgcctgatgtattaacccatgcgacctcgttagcagcagaaggtgaacgcctccataatgtggcggttattccaacaggtgaaccattaccggcacgcaataccagttcgctgattgccgcctgttcaggtgaaccagcgttaaaccccgccccaccgtacagtttaatcaccgcagttgatgtagcctgcggcattacaaccgtggcgattttgaaccagcctgattcgccaagtgtaatggtggttgacgttaccgcaccgatggttctcgcaaattgttttttgtcaggaatatcgccgccgttctgcgatttttgcagggcccctgcagcgagatttatcgtttctcctaaaccgacgttctggagaaacagcggcttattcgggatgtccgcgccattctgatttttttcaagacgggttttaacctgttcatcgatcagcctgccaatggcggcgtgaagctgcgtatgttcgcctttactgagtggtatgccggcggcttcaataacagtacagacctcttcctggactgcatcccacatatcactgttgagatccgttgcgcggcggcccgtggcgggatcaccattcgtaaatccgttttttccctgaccaaatttatctttttgcgcggtgggcgtatcaattctgtgcattctcttttccttccggataagcaaaaacaacaaccgtatgtgacggacaaagcttatcaatcacacattcagcaacagtatcgccccacgttctgatcgcagagtcgcaggtgcttgtacaggtctgccagctgatgttcgcatcagccggaatattcacacgccagtagtaacgccagaattccccccattcaggatcgggtgtgctgtcgagattctgaaactgctcaatggtggcagcggtataccccaacgcatcaagctgttcccgataaaacctctcgtttataccgccagcaacatttgcctttgcatccagccgttgctggcgctgctgtaatgtctgaacgccttccggtgcacaggaatcaggcaggccatacagctgttcataacggtctatcagttctgtggttctggccggatcaatttcagccatcagttcatccgctctctgatgtacccggttcagcgacggcgccagcccttcaatcagtgggttttctccgtcccaggcaggcccttccggcagaaggtgataaagtaactgcgtatattcgtcctgtaatgccatagttatccgttctccccggtataggtggcccaggttatattccccaggacaggaagttcagtttttcccagcaccacatctgccgccggcacacgcagctgatgtgccacttccccggtcgccagacttatcgcctcgctgattcgcgaaacataaatttttccggacggcgcgccatcacgcagcatcagcgcatttagctccgcaataatggcagtacgaatttccggggtatctttggccagtgcgactgttaccggaatgcttttttcagtggcagcgaaaacaaagagtccgccgccagcaacaggtgccagcggcaaaatatggtcacgtacagccttaacgagatcgtcgccaggagccggattcaccgggttactggtagccaccatcacaccaacggtgccggtccccttataatggcggaatgtccacgcacgggttattcccgcgatttcctttgcccagatgacgtaatcaggatcagcgcccccctgtggtatccagtaatagcgttccatgacgcgcgcgcgccacgtttcaggctcctctgtatcagcccccccggtcagagtgtcagcgtaacctgtagaaggaataccagtaatcggcgtgccaaggcgtaacgccgtaccatcgtcagtattaccggcagttcccgccacatcagcaataaccggcacacgtaacaggccgccggaagctttcaccgtctgcagggtcgtgaatgtaacctgatcatcccgctgaatctgtgtacccgcggggatctccggcgttccggcaataccatcccagcgtgcaaatcccttcgcagatacggcatttttcctgggacaacgcttaatcctcgcgtgacggtaaagccagtcctcatcacacatatcaggcagcatattccgggccagataatcgatataaccatacagcgtatgtacggcagcagcctgtacccggctgtaaacctcggcatccatgcgacgtaacacaacatcctgctgaaaacgggtcagtaaatcgctgcgaatggtagcaatcaactgaggaagttcaggacgtgcaaattgactgtcagccattaagtttgctccatatatcatcgaatgtaatattgtgaattaccccgtcccgctgatatatcgtcacgccagctgccagggtatctgttcctgtgcgttcagatgtcacatcaatacgtgccgccacgccatcgtctgtcatccacgccagcgcctgctgcatgtattcgcgggcatcctgcggcgttttattggtgagtttgcggcgtttcagcaggtagaggcgggaaccgatgcggtcattctgaacagcaggccaggtgtccccccaccagccgtatggctgtggggtcctgtcatcccgctccgcccggcgccaggtaaaaagagaaatcaccactgcccgcgtcagaaagtcgagcgaagccgtggcatccttacggattccattaacataaaggatcatggtgtcagctcatgggttggccaggcttatcggttataccgccgccatcgccattttctttatgggtatgaccgttataggtcgtgcgcatttcagccatcgtttttccactgctgtcacagttgtccctgatatcgccagtggattcgatcggcatttcaaaacgtgctttagtggcattcgtgaaaataactggctttccgccgccatttaccactattccggctcgggttaatgtgaccgactgcccctgatcgtcatatagcgcgacttccccgcgcgccagccctttcagtctgaagcggcggtcagccacaaccacagccactccgtgcgaacggccaccgccgggaaacaataccaccgcttctgcgccattctgtgctgcagaggtgaaaccgtaaggttcaagatgctccacattctcttttttttcaccggcaataagtttcagtccggcagtctggcattttctgacggtatcaatcgcggtaatgactgcgcgcgttatcatgttctgaagaggatggttagccatcagaaatctgcctcctcactgacttttttcttcgctttcggcctgaatggttcaggaagataggcatccgcaggccccacccggatttcggtcagggtgccgttattgtcctggctgtacgtcacttcggcgatcaccagcgtttcattgtcaaaaccgttcagcgggtcatacaccaccacggcctgattcggtttccacaattcgccattcccctgtctccatccctgtacggtataggtggtttccagcgttttcgccgcacgctgacgggcttcaaattcacagcgggatttgcagctgtcagttgtggcagttcctgactgctgaatggtgtggggacgataccgcgtgacgcctgcatcaccagtactctgccggatagcagcaatggttgcctcgccgaaatcgtcatccgtaccaggacgctgccccgtaaccagataactggagaaacgctcacgaacactacgctcggtatcacaggaaagaatattttcgccaagtaccagtgccgtggctgctttcatactgcccggcctgccgagaaccagccgtccccgttcgtcgtcatatgccagcgcctgagcctgtccaagcagcctgttcagacagtccacaaccgtttcaccatgttccggctgagcctcaataacggcggctgccggcgcgcctgcatcaacaacgtccacaccgaatggccgggcaagtgcgctggcgatcaggaataaatttttcccgttatgctgtgcaggcgatgcagaacagtcgataagatctgccgttttgctgcgcccgacaatgcccgtcataatggtctgcgcatcataacgtagcggtaacgcctcaacccagccggtaataactaaatcatcgccaatgagtacctctacagcgtcaccattttttactggcggtacgtcttctccaccaggccactgccgggtgatcgagacattaaagtcccgggcaatacggtcaatgcccgcacttatccgtactgacgtccatcctccccagtcacgcccgttgacgcgtaaaaaaaccgtattattcatcgtaccggaaccctcagcggctcaaccgggataaatcccggatggggaacgggattacgagtgaggatatcagattcccgcccggcgtcgtcataccaggctgcagccagtaccagtgcaggcagaacatcatcaggcgttcgcaatgcagtacgttcaacctgtgccagtcgtgcagaaatatcgcgattgagatccgtccgcataacggaaatttgctggaaaagcacatcatcccggatacgcaactgctcctggtcaatcgcagcattgagcgcggtccggatagctttcagatcttcataattcggtggaaagctgccattactgactgtctgtacaccatccagcgccgggtgcatgacagtgataatgtctgagtcacggcctgttcctgcaggctgatttacgccccggacatcaggtacatcacgcggctgcttcagtgttgtcacggcgtggacggctgtgctgatggctgttgtcctgatggcggctgcgatcatattgcgttgcattttctgtttcgcagcagatccggagtcagtgggccaggtgccacggggggaaagaccgggatcaagggtgatacctgacatcgtttttatcatcgtgaccagatccgatgtactgcctctgagcctgtcacctgagcgccaggctttttgcagtgcgttaacgaaatcacttgcggcgcccggtggcatcagaatgacagacaaatccccctgtaacagccgcattgcggcagacacgccggagtcaaccatcctgaaagcatcggcaacatcgcccagcatggaggcagcatcggcaatgacatcgttctggataaaatcagaaatacctgacaacgagaatgtggaaaacatactgtcaatcgcatcgtcgaaaagcccgcctgatgtttccaggcgcttcgccgttgccattcccgccacaggaaaagaaagttcaccactttccacaaactgaaaggagacacgacacatgcgcccttctgtactgctgtgagtgatcctgacctgtccgtcaatgctgccctgcatttcgccatactgcggatggaccagcgtaccagggcctgcggtttcaatggcaccaataagacgatcccgcctgtctgcgtaatcatcaccgacaagataagcatttatcgtcaggcggcgcgtggcgcgacctaaatcctccgtccagggcttatccctgttcggatattcatgtacctgtacgcggcgtccaaacgtgctttcatcatcttcaacggagaaaggcactccacgaaatgatgcatcacgcaggcgcccgcgccagccagttgaggagaaaaaagccatatttaccccataagaaaacctgccggagcaggtttatcgtgatgtacgaaagggtgagtaacccacatcatggctgatgttcatcaatggattaccggatttcggtatatcagtcacacgcataccttgtggtgcattctcaaatgtcactttgagttcgctgcgctgcgttgatggcgggacagctcgcccgagtacgccagaacgccgggtcagtggcacataaggttgataacgcccctgcggaatcggggtgtccataccaagaagctctttgagtctgggaataaaaccgttatacccgcgttcacgctccttcgtttgcagcttctgtacagcgaatgcgccagcatccatacccgcatcctttgccccctgctccagatccttaagctctttaaagagtgacaccgccacgccaattgtcagcgtcatggcccccatccggccaattttacccagcagaccggaaagccgtccggccagcaggacggactgctgcagggcaccaatggtcctgacggtaaaagaaccagccataaccagaccaaccccttcaatcaccgtctcccatccgcccatctcctgcgcaacgttatcgacctcctgccataccgccttaatcaccggagcaacatcgtcccagttctcaatgatcagcatagcgccggccaccagcgccgcaatggcgactttcgccggagagaggttaatgacactgttcaggattttgacagcccgggacaggctgccaatggatacgccaacagccagcagcgccgcgccgaacttcgccgcagactgaaccagttcaggattcgcgcgaacgaatgtccggagctgctccaggtaaggcatgaccgcttctgcagcttcgttaatggcgggcaggaaggtatcgcccagcgttaccgaaatcgcattgacgctgtttttcagcagaaccagctggttttctgttgtggacgcgcgggatgcgtattccttctgcatcgagccgccatattcctgggcatcagccacacgatcaaaattggtgcgtaacaaatccaggttggtcagcagcggggcaatcgcgctaagtgactccttgccaaacagcgcattcatgacggcggcctgtttagcttttggcactttcgcgagcgagtccagcaccttcagcatggccccgcgcgaatccttttgcatatcctcagcgagtttccggggattcagcttcaggaaagccatagcctgtttctgggctttggttgccgaattacctgcggttaacgacagcatgaagtttttgatgccggtggaggcaatttctgattcaacccccatcccggcaatggtggcgcccatcgcggcaatttcgccggatgccactccggcaacaccgcccagcggaccaatccgcgtcacgatatcagaaattttcttcgcatttgccgggccggtattccccagatagttgattttatcggccaggacaaccacgtcttcctgcgtcagtctgaacgctgtccgccactgcgccatcatctgaccggactcttcggcagtggtatcaaacgccacacccattttcactgcgtcgttcgcaaactgcatcaaatcgccgcgggcaatgcctgcctgcccgcccgccgccacgatctctgcaattccctccgccgccatcggtaactgtgtggacagcgtcaggatatcgtcactcatctgcgcgaatgcttttttatcatccaggccgtcaaccaccttccggatgtcagccatttttgactcaaagccgatcgcagcattcacgggcagcgccagcgccccaagaacagcggtcccggcagcggcagcaccgatcgccagcccggccatttctttctgaaatcccttcagttcccgctgcatccctttcagcggacccgataactggtcaacggcagtgataatggcctttaactggaaactgtcagccatgcttcatttcctcattgatacggacagcctccgactccagctccagaaaatcggatatcgccgcccgccggagctccaggggatttattcgccagaagtatgcggtgttgtagacccgctttctgagtcctcctccgtctccgaccgggtaaaaaaattgaggatcaacatacaggctttgaaaatatccagttttgccagttgcgctgccgaggagcgtggaatacctgccagcacagggatatatttcagagcaaccgaactgtccagccggacgccgccatcaccggaaacggtgaacggaaaaccaatggcttcgatttcatcgtaggacggttcgcgcagctccagcacatgaagcttttcgttatgcgccataatcggctttttgagcacaagttcttttatcactggtaaaatccctcctcaccgtggaactcaagatccacggtgccctcttccgggttatggttggcttcgccgtgcagccaggcgtttgagagaacatacacctgaccatttgccagctctgatgtgatggtcatgacatcagaagacgtaattttatcgaccgggaagtttttcggcactttggcggtcaccttcgtatacggtgcccggctggtttccttgtagtcaacggaaccatccaggccaatcacgtcgtcacgaactttggtgttcatggggacttcaatccctccggttaccgacagttgctgtccgtcgattttgaaatatgttgttcccgcaatttttcccattatgcagcctcctcgctgtactgcagacggaactggttaagcaccgcaaacacacgtaactgattgacataatcaggcggaaacagcacatcaaggcggttcgaatcgttcgcgttacgctcaactatcagatgttgctggaacagatcgaagttttccacgatgccttcccgctccagctggcgatatgttgatcccagctcaccacggataacggcaggcgtgacaatggcctgaccaggcccgaaacgcgtaccatcattagcaagtttatggcgcccgtatttactggtaataacagatttcagacggcgcaacacataagcactggtatgcagcgtctcgctgtcaaggtagctgttatccgccacaccatacgcatttttcctgtacgtcgtgatatcccgctgaatacgcagcacgccgctttccacatacgccgttgccacaccgtgggaaagtaacgtctgctgttcagtcgtcgtgaagcgtttgcctttcggtgccggcagcatgtccaccagttccccggtctgggtcgggcgcgccggatcgttacggataaaaaccgcagcacgggcagtacggcttgcagccagttcatcagcaggcgtctgggtgtctttctcatagcccgccagggtgatgtgctgcaggttaaactggtcacccgcggccacaagctccgacagcgtccccgtcttcgccgtataaacgtgaccatacaactgccggatataactccagcgaccgctggaatcattcatttcagttgccatcgtgttcaccgatgccgtgtcgttaaacggaaggccgatataatcgaacggctcatctcccatcgctgccaccgcgtcgttaagagctggcgcaccagcccccttcacgccgctggcaaccgtaatattcacacctgccggtaacacctccccaccgccaaagccgtaataattgagagtgaccggaatttcatttccatataaccccttgtggcgcgcagtcagtgtcaccacccccgcttctgatgttgccgtaaagggaagatcagggtttgcattgaccgcatccttaatgctcacagccaccgccgcagcgtcatcaccgctggtcacgggagcctgaacgcgggttcggccggtatagacattcaccgttccggtttccgtcgcttcgccagttaccgtcaaagcgacggttgctgccgcgcctgtggattcaggtacggcaatgacatacagttcgccaaatggatcggtcttacggtacgccccgaccatacgggccagctggcttcctgcaccgcaaatctgacgggcataatcaaccgatgacaccagaacaagactgttgacggcaattgacgcatcattgctggcgtgaccaatcagcagtgatgccccgctgtcccgggcggtatttgccgccgagttatccatctcggcataaaacagcggaacccgcgtatctgacgggatggaattaaaactaatcgccatttgttttcacctttttattcgtgcgccggacatcaccagcggcctcgcggcgcagccagtagttattctcatcaacatttcgacctccttcaggtaaaaggtcgccacgggccggatcgggaaccgatcgcccttttgcgggtttcacaaacatggtttattcctgaaatgtaatttcggtgtggtgctcgatgtcgccatctggcccggtaccgggttcgataaaatcaacatcaatactgagcgttttaaggtcgggcaggccgtccagatcatcctgctggcgggtgtctgtttcggtaatttcatacttcaccgtgaagtcgaactggtaatacagttcgtggcggttcagatcgagaagcatcccacccgcatactgaatttcatgcgcctgcgggtccggttcccaccccagcagcgccttccagatttcctgcctgacgtcgtgaactgcgtcgtaagaagcccactgccctttttcatcccgttcgttgctgagtaccacgatgacggaaaaaccctccgtcaaatcctgccagtagtcggtctgcgatttctgctcacccgtgacgtcttcggctggcacaacatacgcggctggtagcctgagctttccggcctccggtatcgctttaaactgcgctgcgccacccacacggttttcaaaccgagggcaacggctgcgaagtgccgcaataatcggggttaatttcattttttcttccttcgctgaggacggagtgattttcgcaattcgcgggagagcacataacgtgtccagctgcggcgtttatccagaacctcagtcatgtagttgttacgtggtgccacacgccagccgctgccgcctgatgcgcctcgatgatggcctttcttacgcttcgccccacggcgaacaccgtagaacagaaaggcagggtaaaatgcgcctgagatcgggcggttcccttccccgttcttctgattaggggcaattttcaccatcaatccaggacggcgactggatgcccgcggaacgtaatacccgatggagcgtgccagttttcccgttctgtatgaaggattatcgccgggtccggaacgcccccgcttcatgaccaggcggcgggcatcgcgcatatgtacctgcccgatactgacaaacgcccggcgcatacgcgcccggttaaaaacaagcgtttccggctgttcaaaatcaacgtgtaaatatgctttctgcggcatagtcactcccgttatcggtacccagctcttcgcactcgagcaacagaaagcggcgtttactgttcagatcacggacccgtttaacccgataagaaatatcgtcgtggagcacttcatgatcggcggtgataccgcggcgaaaacggatggtgaaatagtgcgtcaccctgttttctatctgcacagccccctgataagctgccgcgccgggttgcgcttttttggcccacgcccggatctgctccgggtacgtcggcgttacgccaaagtcatcagccggaacatcgacacgccgccggataacaatgcgctggtcaagttcgcctgggtcgggcaaaaggtatgtggcgctggcctgcgcctgcctgagtttcatagcgggatgtacctgtatggaccgacgagccagttaaagctcatcggcagttcgactttctccacttcggtgacggtagaacgattctcgtagaagtgcgtcaccagaagcagcatccccatcctgatgtcatccgagagaataagcccctccggatcgtcggctggcacccccgcctccgccgtataaagtctccggttcagaaaattttctgtcctggcctgaaccgcccgccccaacagctcaagaaatttatcttcatcggcgtaatcctcatccagcctgagctgcaacttgatctcctcaggagaaagcaacataggatcctcctgcgcccgccgggtggcgggcacaaaaaaaccgcttaacgcggcatggtttgttcagaggtgagagggattagctgcttgccgagcctttgcccaccagcgctttaatcgcagaggtatcttcgagaatacagtcaaagcgatggaacgccaggaagccggtctggtcgaattccgcgtaacgctccaccaggcgcttcaggatcatgtagcgaacacggcggataatgaagcggtcgaagtcgccacagaacatgaattttttgcccgcgccaatatcatcgatctcctgatcaataacgtacggaacattcagcactgatgctggcgccacgccgacgatatcaggcagccagagtggacggccctgaccgtcttccatctcgctgatgagtttcagcgtattgtcattgaacgccaggcggaacttcggcccgcggcggtacgccggatcaatactgtgtttcagcgccagaatctcttgccatttaacagctccggcagcggccgtctgcgtagtgccggttacggatgctttcagacccttaggctgttttggcgtaccggtgccggtcccctgaataaggtaacgcgcttcaccgcggccaatgcgctccgcaatacggcgggcgagataggcttccatgtcgatcgcactgtcctgtagcagctcgttggatacgcggataattttggatgtcattttcagcgcgcccagactatccataccgaattcggtatcttcttcacccgcttcttcgttttcacccagcagcacacccacttcagcggtaccatcagcagtggcccattccatagtgcgcccatcggatgtagcgaggatctgcgccacgctggcaataccaccgtaggatttcatctgttcgaccactttcgccaggaaggtatcaggcacggtatagccgcccttttcatccggcgccacaccctgcgcacgcagttcgcgtaaggctttgcgctcttcggaactcagttcgctggcgccgtgacgcatccatttatcaaaaatctggccgcgtttttcgtcctgctgcgggtctttatcaggatcctgattattgcgctgctcttcctcgttttcatcaacgtaggtctggtcctggcggcgcagctcttcttcgcgggcgatgcgctcgtcgagtgcttccagttcagattttgccttgttccattcggtacgctgctcatccgtccatgggttatcgccgattttttcgttcagcgcgcgcatgtcggtcgcgatggtgttacgtttttgtttcagttcatgcaatttcatggtttttccttacgcgttaagaagggtcaggacgcgctcacgcgccattcgttggttaatggctttctgcagtgcgctactatcgcgcgcctcctgccaggctttcatagagcggacggcggaatctgcctcctgatacgccggatatgtcacagggctgacatccagcagacgggaaaaacgggtaatctcacgaatcaccacaccatcctcgtcctggtaccattcctctccgtcgcgggcgacgcgaaatgcaaaagaggactggttgatatccccgcgctgcattggtgccagcaccagatcacggattgtctgagtttctggcgcggtgatgtcataacgcagaccccgctcatcaaccgtcagtgccagcgtgcccgcacttctgcgacccaggataaaattggggtcatggttgaataacgcccgtacatcgtcattcagcacttcatcaaacgcaccgggccggatgatttcgcgaaacgaaccgaaaatcagttcagaacggctgtcaaagaccgaaccatacccgatgatccggctgggctcgctgtcgtgcgtttctgcgcgcacctcgccgctgtaacagcgaatttcacgttcactcatcttgagtgttctcctgggttgtggatttggctggccgggaggcgttaacgctgaccagcatttcatcaaggccgtctttcggattcatatcctcaaacgcgcgtgcttcgttgcggctcatccagccatcggtgatagcgaagtgatagaactccgcgcgctctttggcagtaccgcgcaataaacccgccaggttaaagcgcacgtaatacccggcttcccgttcggcgcgggtgaacaaccgacggttaagctcctgctcccagttcgtcacccacggcatcattgtgtagcgaacaaactgaatcgcctgttcggaaatattggagaaggtggctttttcgaggtcgttgatcatgtgtgccggcacgttgaaaatcccggcaatcatggaacggttgagcttcatcatgtcgatgagctgggcatcgactggggaaaccgtcagcgctttataatccagttcagccgggagcaacattgtcctgttttcctggctgcgcagcatcgccgtggctttttgccacatctctttcagccttttccaggagccgtcattcaattctccttttactgaaactatgcccgctggtctggcgttaccgctgaaaaaactttccgtgtatttctgcccgctcatacccataccgatggtttcggcgtgctgaagaaccggactgagccccattttctgatcgttacccaacgccctgacgtggatcatgtcatcaggattaatggcaaaggaaccttcttcgttatacacgccgtaggtatagcgcccgccggtgttcagcagcgttgtttcccacggcatacaggcttcaaggccagtgacttcaccggttcggcggtgacggagaactctggtatatccgttaccccagcccagaatgtgacgttgtttgagctcgcgccatttatagctggtctgccaggaattgggttcgtcatgaaccaggtaaaaggcaggatggtcgcgggcagtttcaaccttcttcccggttcgccgcatgacgtgcaggggcatctgcgcaacgttggatgaaataacgtagatacatgcatacaccgccgccagtttcattgccgtccgggggttaacaatcacatcaccattaaagatcccgtcgttttcgaccgcttcaacggtgaccggaacagctgggttttccagcgagttgcttctgaaaatggcatcaatcagcatgtttttattctcctggccgccagcagtgcccacagcagcaggccactaccaccagccataagagcaaccgccgcgccaaatttgaggtaaatacctcccaccagcgcgccgaagcctgccaccccggccacatcgataattagtgatttcacaggaataacagttcctcatcaggatcgaggttagaaagaaagtctttcggctcgttcagcattgcgcggccaacccccatcatcaggccaactgcaccatcaattttgttgcctgcgccttctttcaccgggcgaacaacatcgtcgctaccaggcaggtacttgccaaccacgttcgaaatacaccaggtcatcaagggattaccgtcatgatggaatcggccagcagcgatcgcagcctcaatctcacgcatcgggtcgctcatgttcgtgtagttctgggtaatggtgacaggttcaagcccttcatcctgcagcatatgagataagcctgttgcaccgtaggggtcaatcggactcgcggctatcttcaccgtttcccgtaatttcaggatcgcttccaggataaggcggtaatccacttctgcaccgtctgacggaaccagcacgccctgattaacaaaagactggtaacggtctgcaatagttttcaacgccgggtccgtggcgtagacggtgtcttccggtacccagaacataggcgaaacgcagtaataatgactcaggccgtctatttcacggcggaataccggcaccactgcattaaggtcaagttttgatgccaggtcgatgccgggataacactcctcacctgcaaaatcggacagtctgagcgttttgtctgctgcggtcatccacttctgcaggttgtagtaagctgctttagaactcacccatttgttgaaatgcttggtgagtattttattggtctggcctggcgtggacatcgccagcaactgtttagccttgaggaatccctctttcaccgaaatgttgtaattcgggttggctttgatcagagcttccggctgtgtccagtcatcgtcatcatccagggtatagatgatcccgaaaattgcctcgttttcaccaccctcccggatgcgctccagtatctcgaccacctgagtacgtttttcatagcaaggcgaggcaatatcaaagcctgccgtggtgatgatcagcgtgatgggctgctccctcgcccccatcccggtagtcattgtggtgtatagcgcgtcagtatcatgctcgtggtactcatcgatgatcgcacatgatggtgagtcgccatctccagggtcaccgataattggcgcgaacagggaaccatccgggcgagtcattttctttgcccagggtttgatacagaacttctgacgcaacgccggcagctttttcaccatcgccagtgcaggcgcaaaaactttccaggcttgtttttccgttgtggcaccacagtaaacttccgctgcgtactcgccatctgcacagaacatatagttaccgacggcggccgcaatcgccgatttcccatttttacgcggtacctcgatgtaaatctcagtgaagcggcgaaaaccggtatccttgcgcacccagccaaacggcacgcccagcgcaaatttttgccagggttcaaattctatccgcaacttccggcgagcccactctccggaggtgtgcggcattttctgggaaaagcgaaggaaacgttctgctttatttttatcgaagcggtaaggccaatgcggatctttggcacgttccaggtcgtcaagatgtcgctgacaggcaagcatggttaaccggcaggccagtatcttcccgttcacgacgtcccgcgcatactggttcgccgcattgacgttcggatatgtagccatcagtcaaactcatcaaattcattcccttcatcgtccggatcattttttccgctggtcattcttatgcggctgagcgggtctaacccgagaagtgaacccagacgggcgagctgcgaaacggagtcattacggacattgactgcagggtgttttttctcaccacccatttcacttgatacggtcaggccttcttccgcgatgactttttcggcctcaatcatcaagtgaaacgcattgcagtacgccaggagtagcggcgcgtcttcaagatcaaaaacgccccgctcaattaaaattttgctctgcgttttccagatgcggatcgcgatatcactcattaactcttccggcggtgcgatcctggtcagcttgcttttctggcccgaaggcaaattgcgcttacggccaccaccggaagatctcacaacagcacccatcaaaacctccagttcaataggttgaaccttccggaaaaaagtttcttatttttggcgcgtaaaaatttgatgaggcgggcagtccggaagacgtcaggccacagggatttaccccgcccctcccctctggctgtggaaactggtttttatttcagccgttcacgagccgtcttcgccttatggcagggccagcacagactctgcagattactgtcggcatcagttccgccatgcgctttagggataatgtggtcaacagttttcgcctcacgcaccacaccggcacgcagacataactggcataaacctttatcacgcttcagtatgcgctcacggataacgtcccacttcgaaccataaccgcgttgatgacgggattgtcctggcttgtattgtttccagccctcgcttctgtgactttcacaatatccggatggatctgttgttgtactgcgacagccgcgaacacgacaggatttaggtgttcttggtggcatataaactccggtaaaaagcaccgctagtgcggggctatgggattgttggttgactctctcaccgagttgtaaatacgctcacacgtcattcctgcgcggtagctttcgtcagatcgctcagcataatatcgagcttcttctgcaaggcgtccgagcatgtcggcgagcactgcggcgtcggctccggctgttttgcttctgacggcagcggcaagatctgaggtgtgctttgcggcgtccaggcgggcggcaagctttgttgcttcggtacgcagctggctaacagtggcagacaggccagcagcagtggcagcagatttagcggcttgtgcttgtgcatcttttacagcctcatcacgggcaattatgcgcccttgttcaatccagcgtgcggcagtctgcgcgttcgcttcctgtgaagattccatgctattgcggtcagcccacttcttttgccagccccgatcactccagatgatcccggcaagaaatgcaccagccaacatcagcaaaacaatgattgttttccaccgcgccttaacgaaagcaaagaccgctgtcataccagcaacgccgcccgcgctttgttataacgactatttctgtcagccagtccattctggccaccgttgatgatctgcgttacacggacaacatcacctgaatacatcaggcaaccacgtaatgtgaaaaaccatgcagcagaacgggctgcatgcttctcctgtgccagcaactctggtgtgctgatcagatcaagcttcagcgcagctccgcatttgacgtagttctcgcggccggtgatttgaagcagaccacgcccgcgatacttccagccatctccggcgtctttgttacccatgcggccaccgtaaaccagattggctatttgcggctggtgggcaacctggcgaccatcaatacgccccagcatttcacactgatacggcgtcaggcgtttaccaaacgtctttttcagcgcctccaccgaataattgaagctttccttcagaacagtaaatcctgctgattcatgtcccgtttgtgcaataaacatggcctgatcattaactgctgtaataccaaactctttcattgccgcatcaatgtgcggaaaccagcgtgcagaaagcccggcgctaataccagccgcctgctgaaattgttgttgattcatcagtgcctcagtgcatcgaccagacgcgccacattaccgcgagcccacagcacagcggcgcagataaggatattcaccatcaccaccagccagtgggatgattcatataaaccaaaaacaaaccggaaagggacgctggcatataccagcaccatgacataggccagtaacgaaatcagggggcggtgtgtcgcatcaccgcgtcggtaaaacatcagaacgatgactatcaccccacaaattacggcattcagagctgcagaagggtcatttgctaccatctgatccccctcccctgatacgagagagaatactgaacagggtgttcagatcctgactgttgagaaaagtgagaaactttatacacattgcagaaataatcactgcgccaagtgcatccagtggtttttcataatgcgttattgccgcaagcttagtacctatcagcccggcaccaagcactcccacaataaatgatgtaataaaataagcgaccagcctgatgcgtccgatgttggttgccgtggcgacataaaacaccgcgccggcaaaagcgccgaataccacaccataatcagttccggttgccagaccgaatacactggcccccattaatccaccagccaacactgtcgcactggatacaggttcggacattcatccccctctggttatgtgggtcctctcagttatgaggggaaataaaaaaggccgcccgaaggcagcctaaaagtatttagattttttacagcgatgattggtggaaccgaactgcaaggaagtaaagtcccagcaaagttgttgttatgatattcattaagatgaatatataaacgccaacaaataccgttttaagccacaagattgcatcaggagaacagaatgtgagcagccacaaatggaaaggcttcccaatcagaatagaaatcatccctaagcaaaataacataaagctcacaagagctagataaccaaaaaggtaacaaacaaagcgcctgcgcgtcagttctacagtaagcttctgccctcggaatttctctactagagtcggaggtacgcccgccattacttcgtcgatcgaagagctagaaaaagtagaaaccgcagccagtgctgcgatataaaaaccaatcaagacttgaagtaacccattaacctgaagcaggagtccgttagtctcgattaaagaaattttgctagcgtgaaaataataaacaatagtgacgattagagacactgcagctggtattttgtaatcataccagtccttttcctcatgcttgatgcggagataactcagcggtgaaaaaagtttcatatgaaactcccgttagagcaaccctatcatttttgtttcaagctgcagatgtactgtgctttcacattggttgatgaggttacctaatattaccctctcacttttagtgaacagttttgtggcagcatcttcgttacggtcaagatccaaactggcttgcttgccatcttttgagtaactaattgaaaccttggtatatccagactgctgccctttctttcttaaaatctctaacaacctttctttatctttcaatggcggctgtctaatgattttatactttacggacctttctgagagctcagtgtacgccgtttggtccaatccacctttccttcttgtactcacaagtttaacgttatgaatctttgcaccttttaatgcatccatcagcgtttgtgaaccatgagaatagatttccagctttgggcggtgctggcacatacctttagttgcaggatttttaaactcacatccagcgaaggcttctctgagcatagcatttaaaaatggctcaagaactgacttactgataccggggacagattcaacgagagttttgtggtgatcggcagtgtttttgacaacatctgtggatattacaatgtgacaagaaactgcgataccttcaccggcaagcttaggttctactctaaggttgcctgttgttaactcaccaaaaacagggtcagaaccatttttatcacaaagctggataagtagagtcgcctggctatccccaatagaatatttcatctccgaaatcctaagcgctctagacctatgattgtataactttacagcactccctgagctcaccagtaccttcaatttcttgagtatgtcttcaatgggaatactcggcgccgctgcgtgtgtaggcgtaaaagcaaagtcaaaaaaggaaacccaacgttcgttattagagagcacaatgtcaccacttaattttagttcttgtccatacaataacttagcaagacaaaaaataaagtgatcacaaataaaaaacccactcggaggcgggttcttgagacttatcaacgatagacatacaaagcccatcgttgggagaatcttatccatattttttgaaatatgcaagcatcatgtcgctatcttcgttgaaaatctttcatcttgtcacctttcttaattgcgcttctgcatatgcttcttcctgccagcattttgtaaccagtttatcaatgacgtctgcatatcctttgtaccactgataatccgtcagatccggtaccagtttctggacatggtgccgcgccagtgtggttggtaaacgactaaaccggtttccattgcaacgcccacaaatcttataaacaggcgcgccatgaaaccgagttcttttttcatccaagacaatacctttacccttacaccctctgcacaccgtgctgacttctcccttaccatgacaatgctgacatagttccttctcccactcctctttgatgacgggttcaccatttctggagtgtttcaccacttcacgtaatacatgatgaaatcccgtaccagcacaatgctcacagcgagccttgcttgcagcagatctggaataatcagcaaatgcaaaattcacgaggtaaggaacaatctgtaaccgagtttcttcactcaatttattcagtgtcgggttatccagtgccaccgcgtaatgaatcagcccttcaatcgcgaagtcaggattctgaataccaacttttgccaggaataaagcaaaccccagtggtgctttcgattgcaccatcccctgcgccgccattacatccgtaatcgtcaaagattcggaggttgtcgccggagcgtcatcgctcaattttggagattttggtgagtaatattttggtaaggcttcaaggttcatgcgtgttctccatttacgccagcacgccgatcgccagcgcgcgatcgataaaacgaaatatcaactccagttgagagccgtatttctcttcgaatgccacggtgtccgcatgtaactcattgtgatgcgttctgcacaacggcagcacaaagaggtcatgcgcctttgttcccatccctccctgaccgtggcctgtcaggtggtgcggatcatccgcctgcttcccgcagcacgcgcacggctgggatttaacccagcgggtatatctttcattgatccatcgacggcgtttcggacgtaacatgaagctttccggcgattccggatcaaccctgagtgccagtacctttttcgccttatcctgtacaatgctggtggccggcaccgaggggacaatttcactttcacgggtagctgactggacaattgccttcggcatccttaatgcttttctcgcagcgctctccggtaagacttctgccaggtcattgcgtaccatccaccagcacagttccgggagcgtgactgcgtgcatatcgtcaaaacccagatcacgacaaacaaccgataaaacccattttgtcgtgttctccacagctattgattccagccgttccgtaaactgttcgcgcagcaggttatcgcagtgccagcacagtcggattgcccccggtgcgtggcgcatggttgtcatctgttcgctgtgccagactgaatgcggccactgacagccattcccccggagtagccagctttccagactatcgagaccaccagcacgatagataaccgactcattacggaacacatcacgaacagcaggatcatccgccagcggctgtgataccgccgggaccgcgccgcaggcgaaagatgaatattgttccggctctggttcaagcagaacacgcccctgcataaacaggggcatcagttccgatcccggcctgaacaatacaacgcccatacgaggagcaatttcaggggtcagtaacgctctcacgatcacctcaatgaacggtatcgagcagcttcagcagctcagggaatttggattcgaagaaatgcggctgcgtctcgcgagggtttgccgggctggtgatgtttttgccgaacatgcagcctttcgccgtcagcgaccaaaattttttaatgccgttaatcgcggagcgactgtaacgctcacgatgttcaacaacacccagctttgctaactgctgatacgcctgattagccgtcatccggataccatgctgttttaacagcgcgctcagtgcaagcgtcgggcggcttgaaccatccggcgcgccagccggagcatcaatggcatattgtggcgccaggttaggtagtcccactgcctcctggagtttctggcacgcgcccagtaccgatgaattggacaggtttaactctttgcgcataaaacccagcagaatcacccccgcctgcatcttatcggcagccataccagaagatatttgtggcgcactggtaatccgatcgaacgtgcggatcaccttgagatggaaagacggactgatccacattgcataagcaaataccagttctttgcatacgtatgtaccttgttcagcaccaccgcgaacagtatttactggagcacgtgccaaacttcgggtatcactaccgccctgaaaaaagctaacagattgattttgttccgagggtggaattccgccctcggtgaaaagttgctcaatcagctcacgggtttgcttattatcaagccagtacttcggacggtatttctgctctccacccgcagcccggtgcaaatcgttaagacaatagcgcccatgaacgtcgcggcgaacttcgataccatcaatgaccattaaattattcatgcttctttctccatgttcaggcagctgcacccgcccctgtttcaaatttcgtgatcgtgatttctaccttccccttcgggaaaactggtccccactccaccagcattcttttcacctggctgtcgtcttcccacacacccgcgtgggtcagggcgtcaaacagcgccttgttgtagttgtccagatccctgatccgcttgtctggcggatacagggtgatttccaccgctgccggggctgttgaaggttttggcagacggcgtaactgctcaatcactgccgcgcacgcctcgctctgatacttccggccgctggcgctgaccatgtgacgacctttaagcggtcccttattcggagcccgccagtaggtgttaacgctgggtggaaatggcaatgtcagtttcatgccgccccctacagaatcgccacgagatctttcgctttctcgcgggtactgcccttacttgatattgagcggcgggcgctgatatagcggatttcaaagccgtgctgcgagtacaggtcgataacacgcggagatgtggaattgccgatcacgactctggcacctcgctgatgagcagcaacacaacattccgccagcgcgatatgatcatcccaggtaaagccaccagcggcgtagtgagtaaaaccatccttgccgggcatcggttcgtagggtggatcgcagtacacaacgtcaccctctcccgcaagtgccagcgtccggcgaaatcctgccgccatgaatacgcagttgtgcgccatttcggtaaatgccctgatttcttcttccgggaaataaggcgacgggtatttgccccagccaacgttaaactggttgttgcggttgtaccggatcaggccattgaagcagtgacgattaaggaaaaggaaagcggcggcgcgttccggagcgtccatcacctgagcattgaactcttcccgtagcgccatatagctttcagcgtcattgagacggtcaaacattaccctagcatgtcttatcaccgcaccaggtacaacagccagcatctgatacagattgataaggtcggtattcacatcggccagcaggaagcaggcgtgtttgtctgagttgagaaacaccgaaccaccgccgacaaacggttcaatcaggcgcatacctgccggaatgacctggtaaagatcgggtaacatggaatatttaccgcctgcccatttcaggaacgggcgacgccaggtgcgcgaagcggattcatcaacagatatcgttacatcactgctttcaatacaaacggattcactggtcattccacgttccccacaaatcgccctgccagataaacctgctctacgggtctgattctctttttgatgcggttcagacacttctgacggcggcgtaaaaattcctcgcgttcgtagataaactggctttcgctaaatgcctccagccacactatcgatgcacgattaaataaccctctggattccagttcttcagcgcggcttaccagctttgcaatcaccatcggatcacccgaacctgtatgacctgaccttttctgtcgtaacgtcaaaatcactgcctcgtctttacccgcgtaatagcgaaatacatctccatccaggcggcggttaacacgcttacaccgatacaacttgctcgctgaacgctgcacatcaaagcgtgcgtattcaggaaaagcatcggcaatctcatttgatgtcagccccggattaagctcgataaacgcctgcacttttgctaacagactcatcctctgaatccctccggaatcgttgtatcaaccggaccaaaagccatcacatcgcgcttcttcgcaccccagtcagcgcgtttaggccgccccttctgatcccagcgggtagcgctttgcagatagctctcgaatttcttcggaccgaacagcgtttccgggcgcatgtactggtactgctcgtcgttctcgtgccagtgctcatgcttcaggtcgataaccagttgcagatcagcaacgctgtacccctcacgcagtcgggcacggatgttttccagggaggtttttgacttctgataccgggagccacttacctggttcaggtgggttaaaacctcaatcgcctgatcggtgagcgtcacttcggggtcgggttgctcagcaaccggacaaaaaggggttttactctcctgtgtaatctcctgagtagtctctgtgtaatctcctgtaggaaagattgtgggatcgccacatgcttgttcgttgggttgccccgtacttgtttgcggggtttccacattcttgtttgcggcatcaccgcaatctggtttgcggggttgcaccaatccagattgcggggtttccacattctggaagtcccgcaatctggttttctcctgagcgccctttttcactggcttcgccgtttccagcaacagcgcttcaagccgtgcggtgttgatgcggtagtgcatggtggcaggtacaccgcgacgggcttcttccagtacaccaagtgctaccagacgtttacgtgctgtttcctgttcgtcgcgggttagcgccgtttcactggcaatatcagcctgtgttttgtacatccagccgccatccatccggttatgccagtaaacaagctgggacaggaatactgccgcaaccgggccagcttttaccttcccggctttcagttttgcaaaagcagggttgtaggcgatggggcgatcgagtaattgaataagggaactcatgcagcacctccgagatgcttcatgtttttgccggaacgaaaggcaataagcggcatgttgacgcggtaattacgcccaagaggctcacagacaaccttctgacattcgcgatcgaccaggctaatacgcagaacgtacccttctggtgtgctgtaccactgtcctggacgagggcaatgaaaacgttggctggtgaaccgtttaaaaatattccggatcatttgcgcccccttacctctgaacggttcagtgtcatattgataaggctcgcaagcgccgcagcgtcattgatgcgatcgtgcaggcttacagccagcggagattccgctttttccagcatgggataaagctgctgtaaccaaacctgatgaatggatgaaatgtaggaataaagaacgctggcattatgtgctgcatcgctcagcaccgatggagttgaaagctgtttctccatctggttaaaggcatcgatgtatgcctctttaaactgagcagcacgtttaccagtgaaacccattgccaaaaacgcaaaaccatcgcgtgtgatttgatagcatgggagtttgcgagtaccgccgttgggctgatttattgaaatcgatgtaaacgcaaaattgcgtttacgaaatagagtggaacattcgagagattctattttacggataacatcagcgtgacgcttgatgaagtagtcggcaacagccagggaggaagtaacggcttggccgttaataattctaatttcaggttgagcgagggttgggacagtagccatagtggcagcctctatgttgaattcaatgaactcaccaccaaggctttccacgaccttataggtggtgagacgtacaggggtggaaataccggtcaacatagaacccggcccagccgaaactggccctgcacgccccaccataatttgggcgtaacaatgctcatgacaagaaaaaaccgcatgagcgcggttgtgctctatattgaattccgggtttccacgcccggcacccgctttatgaggtgcctgaacagtgtaacgtcccggaattgcagaatcaatgtgttcctggcgcttcacactcaacaaaatcacgcctgaatttccacaaagggctaaaacactcatgcggatagcccttgcgcagatagataacgcgctcagtttctggttcccagcgaatgacatggacataaagtccccttccatcccgaaaccagcggttaagttcctgcacgattcatcccccacggtcaggctgtgttccctgtggttacgcacgaccaggctatttgataatctgcattcatgacgcaacggccggtactcatacatccccggttgttgcgacaaacggttatttaccgttaaactgttcatgcgttggttttctccataaaatttgacgccacggcgcccggagctgcacactcgcgggcgtcacccttttctggcacgcaaaaaactctgtataccagtgtcgaatgctgttgcagctttgcgatcgcctgatacaactcctcatcaatcacggctttttcatgtggctcaataacgccatcttcgatagccaccctgatttgctgggaataactggtgatctgctcaatcgcttccagcaggcgatgattaatatctgcgttatccacttcttccatatctgccagcggaacaaaaacgccacctgatgccctggctactgaatgtgccaggtgataggttcctccggcacgttgcagtaccagcgcccacccaatcgggaagatctgatcaccaccagtacgcaggcggttaaacagagcatctttggtgacatccagccattccgcagcttcttcataaccgccatgcagactggaaatcgtctttttaatcgcagccaccagccagcggggctgcttttcaactttccattcaggttcatgtcccacggatctactccttctgctgtggtggcggtcaaatcgccgaatcactaagctgatatctgtttggatacaaaatttgcatctcgctaatttctccggcgtaaaattgagccaggcgctcagcaagctctgttgaaggagcctgctcgcatctttcaacccggcttaatgttgcaggatcaacctgaacccctttagcgacgtgctgtaacgtataaccatgcgatttccgcaattttctcaatggtgattgcataaaacctccttcttttgcgtatgtcgcatgttatttcatacagcaaacttgcgcaagttgatttgcacaatgcgcaaaaaattaatgtaatgaacgcatgaatataggaaaccgtgtcagacaacttcgccgcgcgaagaacatgaaaattgctgagctagcagaagcgatcggcgtggatgccgcaaacatctctcgtctggagactggcaagcaaaagcaatttaccgaacaaacactttctaggctggctgactgcttaagtgttgatatagcagaactctttacctcagacccaaaaggtaatactgtatgtaaacacagtgatatgaggaaggattcagctaacgtgaaggatttgttccgtatcgagatactggatgtcagtgcaagcgccggtaatggactcattcagggcggtgatgttatcgatgtaatccatgctatcgaatataacaaggacaaagcactagctatgttcggcgggcgtcctgccgctgagcttaaagtgattaacgtgcgtggtgacagcatggcaccaacaattgaacccggagatcttatttttgtcgatataagcatcaaccagttcgatggtgatggcatctatgtctttggctttgatgataaaatatacgtaaaaaggctacagatgatccccgataaattactggtgatatctgataacactaactacagggaatggagtattaccaaagacaacgagtgcaggttcggtgtttttggcaaggttctgataagccagacgcagtcactcaaacgacacaattaatagaaagcgtcgacaaggccaccattatagtggctttttttttgactcaaaattgcatatatcgcaattttatacttgcgcaatgtgcaatttaaatgtaatttgcactcatagagcagcgaacaggcaggacgcccacgaagtagccgccggtggcatacgaatgaccggatgattcgcaatgatgcattacacaggagttcagatgaataactactacacatgctccttctgcggggtcagtgagctggatgcaaaaaagctcatcgctaaaggaagtaaggacgagccagctatctgttccgagtgcgttgtttcatgcgtaaacattcttatcaactacgcagccgtgataaagccagtaaaactgaacgtcacgaagggggaatgatgctggttaatgcaaagaaaagcgccatcacccaacggcgctttaagggaaatgaagtagttcaggtgttccttattagtgcttgccttcttgtgggctgtgaacgtcggaatttcgcaaatcctgaatatgcctttgcaagtctgaagccaggctctcagccatctcaggagtaagtactaaaaattgcgtttcctgagcagactcaattggttgcatcggtgatgagagaaactggaatttcactaccagagcgtcgtaaccaggaagcggtccagcctgccagccggttacgggaaagacaggaatatcatccttctgagacatgttaagcccttatgttgttggggaattaaaaagattacccgaatccttactgttggggaatagcaaggtccaccgagcctgatgtggtgaaaagacaggcacacaacgatgagagcattgacgagcaaggcataagtgctggttcgattccagacagtcctgtttagtcaggagggttgggcagagaaaaggtccgttcaattcggacaccggcagtgctctcttcgttgtggtaatccgcgaaatggcgcggcggtaagtatggcgggtttttctccatttgtacccagtaggacaccgggttgtcaggttgaccatgcgcctgagtgacagccccaccacaacgttattgctgtgtgaagtcttgtcggcgtccggctcttccaacaacaggaggaaggcgacagtgttctgccgtgacgccgacctttttacacaacagaaaagagcatctccgcgcgacgggctcattacccaatccacccggaaagctgttacagcaggtgctcttttctgttttgtggagaaaccaacgtaaaacgccagtgcagaggcgttaaggaaacaaaatgcataacccattttttaaaaatatgctgatatatcgcttcagccgcgactttaacatcgacatagactctcttgataagaaacttgagctgtttcgcttctcaccatgcggaagccaggatatggcaaaaagcggatggttttcaccattagtccagtattcagatgtgctatatcatgcagtcaataaccagttacttttggttattcgtcgtgaagaaaaaatcatacctaaacaaacgatcgccgatgagattaataagaaggtttccacgcttgagcgagagcaaggccgccgtcttaagaaaactgagaaagactctattcgtgatgaggttcttcattccctgttacccagggcgtttactaaaaacagtctggttcgtatttggataaacactgcagccgggtttatcgttgttgatacatccagcatcaagcgcgcagaagattctctcgccctgcttcgtaaaaccctaggttccttgccagtcgtgccgctgacgatggaaaaccctatcgagctcacgctaactgagtgggttcgtagcgaagcggctccttccgggttctccatcggcgatgaagcggtccttaaagctattctcgaagatggtggcacaggccggtttaaaaagcaggatcttgcctgcgatgaaattcttacccatatcgaagctgggaaggtagttacccagatttcaatggaatggcagcagcgtatcagtttcaccctttcttgtgacggtatattgaaacgcataaaatttgcagatcagttaatcagccagaacgacgatatcgacagcgaagatgtcgtgcagcgatttgatgctgacattacgctgatgacaggcgaactcagtaatcttatttctgatttaacggctgccctcggcggcgaagccaagcgataactcatagcggcaattaaccccacatcgtgggttgggttgctgtactcaaaattcacgcggtgcagcgcgaaataaattataaggagaaccaacgatgagttttattcaaacactttcaggtaaacaatttgattatctcagcgcaactattgacgacattgatattgaagatatcgccgtggcgctttccaatatttgccgcttctccggacatcttcctgaattttatagcgtggcgcagcattccgtactgtgcagccagcttgtatcaccggagtttgcctttgaagccctgatgcacgacgcagccgaagcgtattgccaggatatccctgccccattaaaagcgttactgcctgattatcgcgagattgagaaacgtaccgatcaactgatccgctttaagtttggcttgccactggaagaagccagcgtagtgaagtatgcagatctgaccatgctggcaactgaacgccgtgatctggatattgatgacagtattccctgggtaatactggaaggtatccccccgacagatttattcgaaatctacccacttcgccccggtcaggctttcggcctgtttatggcccgctttaatgaactgatggagctacgccaatgtgctgcataaaagataaagagtctgtagtgaaggcaatcagatcaagacttttgtgggagcgcgttgaaggcggtgcagcatgaaactggaaatgtacaccctggacggatcggtgattgttgatagcaatctggtaacacagttctatccagactacaaaagcggcggcgagttaacagtcatcgagactatttcagccaccggagaaactttcaccgtgagggttaaacactcgtttcttcaggtaacaagtgcgctggctacggcgtggagcgttgatgaaaagaaagctgaaggagcagctcaatgagcaaccgaattcgcaatgctcaggtattcgacgcgcgcaccggtgagtacccggttgatatgtacattcgctggatcattggtggtgaacttgattttgatgccaattatcagcgcgggtatgtctgggggcatgaagagcagcaggcattcttaaacgcagttatttctggttttcctatcggctcagtggcgctggcaaaggcacctgactggtgttcgcgtgaacttccttacatagaagttgttgacggcaagcagcgtctcacaaccctgaaaaaactcatcaccaatgagattccaatcatcttggctgatggtccgctttactggcgagatatgactcgtgcggagcaattggcatttgggcgtcgtccactcccagcagttgtgctggatgaggtgacgtacaaggatcgcctggcttatttcatggcggtgaactttacaggtgttccgcaaagcgaagagcacaagcgacacgtaatgcaactaatggaggctgcccaatgagcaacatcgacaaactcaatgaccatgaactggttgatctgaaaaacgctatcgaaagagagcttaaacgacgcgctgatgggccaaaagtcaccacgtattatgtcgtctcctgcataactgatgctcagcattttactgatttggactgcgctttacgttgcttaaaaagtgtcaccgaaaaccttatggagtgggtaacggaatccccagaaaaccgggattacgtcaatcaatgcacaggcattgttggggcaaaactccaggtgaaggagatgaatctcgatcacttcaacatgcgcgtagcagaaaaatatttcgacgatatttgttatccacaggagacagcccaatgagcaacatcgataaacaggcgctgcgtattgagagggggtgagatgtgtaacttccacgaacgcaaagttcgtcgaactgaatattaccaacgtttcgtttttggctggaagctgcgtccctgcacggcgtgtaacggcagtggttattacgaccacaacggtagtccgaaatgctcgtcctgcaatggcacaggcaaagagcggtacaaaccaaattagtagaattacggcagaaattaaacgccgctggcatcggcaaggggaagtgactatgtggagaggattaaatcgcggcggcagccagatgattctaactgcctacgaatacgatccggaaaccgaaaaatctcagtctgtttaccttctacggcatcacagcaaggttaagaagaccacgcttgaacagaagctgacagttaagaacgacgccttcggacggtttaagcctttcgttgaacttgaagattttccggaagggcttagcgaacgcgaagcaatgctgaaattagctgactggctgcaccgacttagtgtggctatcgaagataactggagtacaccatgaccactattaccaaagaatggctacagcaaactatcgctgaatttgaaaacactcgcgacgatattccgtttggcctgagcgatgacgacgccaaagttcttattgtgctgaagcgtgcgctggcatcgctggaagctgagccagccggatatcacgtaatcaaagagtgcggaaaggttggctgtagtgttgcaacgcttgaggaagccgagaaaacgcgagatttctggaataaaaagtggactatcagaccgtatttttacaccgcccagccagtacaggaaactggcgtttacaatgatgtgctaaatatcatcagcctgttggaaaacaacgaatgggctgagcactgcacgagtacagttttaggttcacttctggaatcagaaataacgcgtctggttggcaaagaacagtcagcgccggtagtcactttctatcgcgatggcgttgaagccgccgccaaatggatagatcagcagcgtgaggcatacgacagcgagcatggatggtctgatcctgataccggagcgttcgagttcggcaatgatgcccaacgcggatattcatccaccctggaagaattggccgaaggcattcgcgctctgcatccaaatgctggcaactctccggtaattccggatggttggataagctgtagtgagcggatgccagaagacgagcaagaagtaattgttcataacaagttgggataccgttatgtttcatattttgatgagcattctggactattttttgacatgcgaggcggcaatcagatgaactgtattgagcacatctttgttacacactggatgccagtgccagcagcaccaaaaccggagataaataacgaatgaacaacttaatggtcgaccttgaaacgatgggtaaaaaacctaacgcgcctgttgtctccatcggtgctgtgttcttcgatccgcaaagtggtgaaattggacctgagttctataccgccgttagccttgaaagcgcaatggaacaaggtgccgttcctgatggcgataccattctatggtggttaagacaaagcccggaagcgcgagcggctatttgcgctgatgcagtatctgttacgaccgcgcttattgagttcaatgactttatcacctgtcacgccgacgatttgaaatacctgaaggtatggggtaacggtgccaatttcgataacgttatcctgcgtggcgctttcgaacgtgccagcctcccctgcctgtggaattaccggaacgatcatgacgtccgcacgatggttactttgggtcgtgcaatcggcttcgatcccaaacgtgacatgccgttcgaaggcgatatgcacaacgcgctggctgatgccaggcatcaggcgaaatacgtttcagctatctggcagaaactgatcccgcccaccagcaacaatatctgatttaaaccgggtgcagccggttagatggagaagcaactcatgagcgatcgcttcctgactgaggaggaactggaagatgctacaggagcaagccagaagtcactccagaaagaagtattaacgctgaacggtatttattttatagaacgccgggacggttcaatcagaacaacctggtatcatataaatcacccagtttcgcgccttcttccaccagcagggtatcagcctgtaccaggcatgaattttgacgctatagagagttaacatgggtcgcaaacgtgcgcccggtaatgagtggatgccaaagggtgtattctttcgcccttctggttactactggaaaccgggaggatcaacagaaaatatagctccagctgatgcaactaaagctgaggtctgggtggcttacgaaaaaaaagttgagggtagaaaaaacagaattacattcacacaattatggcgaaaatttcttgccagtgccgattatgctgatctggccccaagaacgcagaaagattatctggcacatgagaaatatatacttgccgtatttggtgatgccgaagctaaagcaataaagccagaacatatccggcgttatatggatgcccgtgggcaaaaaagccgtgtccaggcgaatcatgaacacagctctatgtcgcgcgtatttcgttggagttatcaacgtggttatgttcctggtaatccttgcgttggtgtggataagtttcctaagcctcaacgcgatcgatatattaccgatgaagagtacagagcgatatataataacgcaacgccagccgtcagggctgcaatggaaatagcttatttatgtgctgccagagtttctgatgtattgaaaatgaactggaatcaaatactggagaaaggaatttttattcagcaaggaaaaaccggagttaaacaaattaaatcctggacagatcgcttacgtgatgccgttgaaatatgtcgtgaatggggagaggaaggccctgttatcaggactatgtatggcgagcgttattcttataaaggatttaacgaggcgtggagaaaggcgcgaaaggctgcgggggatgatctgggacgtcctcttgactgcactttccacgatctaaaggcaaaggggatttcagactatgagggaacggcaaaagacaagcagaagtacagtggccacaaaaccgaatcccaggttcttgtttacgatcgcaaggtgaaaatgagcccaaccctggacaggaagcgttgagcttttcgatgtgcgccagttaaaattctggcgtttttttctcaccgaattttctcattttttctcaacgtgattttcatcactataagaaaatcacgtaagtgcttgaatagtggcggagagagagggattcgaaccctcggcggagttacccccgcaacggttttcgagaccggtccgttcagccgctccggcatctctccgtatattgcaatgatgccaggtaatttggcattttaacagaccctattcgggtaattttgttcaagtgacgagtttacgagcaaaacgatgattaagtggccctggaaagcacaagaaataacccagaacgaagactggccgtgggatgatgcgctggctatacctcttctggtaaacctcaccgcgcaagaacaggctcggcttattgcgctagccgaacgttttttgcagcagaaaagactggtagcgctacagggatttgagctcgactcgttaaaaagtgcacgtattgcgttaattttttgcttaccgatcctggagctcggtattgagtggcttgatggttttcatgaagtgctcatttatcccgcgccctttgtggtagatgatgaatgggaagatgacataggtctggtgcatagccagcgtgtcgtacagtcggggcaaagctggcaacaagggcccatcattctgaactggctggatatccaggactcgttcgatgcttcgggtttcaacctcattattcatgaagtcgcgcacaaactggatatgcgtaatggcgatcgcgccagcggcatccctttcatcccgttacgcgatgtggctggctgggaacacgatctccacgcggcaatgaataatattcaggatgaaatcgatcttgttggcgaaagcgctgccagtatagatgcctatgccgccaccgaccctgcagaatgttttgccgtgttgtcagagtattttttcagcgcgccagaactgtttgctccacgtttcccggcactatggcagcgtttttgccagttctatcgccaggatccttctcagcgcttacgggtaagcgctgccgaaggcgactacggcgaggaatccgaacattaattcctcactttgtgggttaattaaccaattgaattggcgcgttaattttactgttgacacgttatagccggcccagtattatgcgcctcgttgaaacaattcctctgtagttcagtcggtagaacggcggactgttaatccgtatgtcactggttcgagtccagtcagaggagccaaatttagggaagcagacgttcagtgacgtctgctttctgcatttatatcaactggttatgcccttcttcaggttcaccctcgttcactaaaaaccactcgaagccatacccttttgctggtaaagctggttcgatttgcgttttaccagcacgcggggggaaccgtcatgtcacttactgatactaaagtaaaaaatgccagaccagcggaaaaggccgtcaagctcactgacgggtttggcctctatcgattcaaaatactggcagacaggctatcgcttcaatggcaaacagaaggtgttttctattggggtttaccttgcggtttctcttactgatgccagacaacgccgtgacgaggtcaaaaggctgctggctcaggggattgacccgaacgcaaaaaacaggctgatgaaaaaatccttcaggaaaagcgcgataaaacccgctcgtcccgtgtcgtcgccaaaagctgatgcgccataattctgcctatgatattgacggaaatcttttcgcctgcaccagaaatttatctgccatttccgctaccggcgtcagactgcctgtatcaaccatttttacaaaatatttcacgtctaaagttcattctgccccctgcccttaatctctacggcgttatgtctcagaattatttgccaagtgcctgccagtttttcacgtttcatcagacgccggcacatagccattgcggtaaggtcacagcatttgacttgtgcaattacagacaaagttgcgccatgccggggcaaagtagaaattagatcaaaacttcaacgctttgttgtttttgtcagcaaacaaacgcgcaaccttatttccccctttgacaagccgatcgcacatcgttactatgcgccccgttcacacgattcctctgtagttcagtcggtagaacggcggactgttaatccgtatgtcactggttcgagtccagtcagaggagccaaattaaggaaagcagacgttcactgacgtctgctttctgcatttatatcaactggttattcccttcttcaggttcactctcgttcactaaaaaccactcgaagccatacccttttgctggtaaaaatgctggtaaagctggttcgatttgtgttttaccagcacgcggagggaaccgtcatgtcacttactgataccaaagtaaaaaataccagaccatcggaaaaggccgtcaagctcactgacgggtttggcctctatctgctggtgcatcctaacggttcaaaatactggcagttaggctatcgctttgatggcaaacagaaggtgttttccattggggtttaccctgcggtttcacttgccgatgccagacaacgccgggacgaggccaaaaggctgctgactcaggggattgacccgaacgctaaaaaacaggctgatgaaaaagtccttcaggagaagcgggataaaacccgctcgttccgtgtcgtcgccaaaagctggtttgccaccaaaacaaaatggtcagaagattacgccgatactgtctggaagcgccttgaaacctatgtcttcccggatataggcgacagaaacgtttcagaactggatacgggtgatctgcttgtcccggtcaaaaaagcggaaacactcggctaccttgaaattgccatgcggattaagcaatacatcaccgcgatcctacgtcatgccgtccagcaaaagcttatgcgtcataatccggcctatgatatggaaggcgctgtccagaaaccagagacggaacaccgccctgcactggagctggaagagatcccgctactgcttgaacgtattgatgcctacaaaggtcgtggactgactacgctagcgattaaactcaatctgctgatcttcattcgttccagcgaacttcgtttcgcccggtggtcggaaatcgacttcaaaagtaagttatgggtgatccccgaacagcgggaagcgattgaaaacgtcaagcactcgactcgtggggctaaaatgaaacgtcagcacttcgttcccctttgcaggcaggctctcaagatactgaaagagatccgccagcttacctatgaagaaggtaacgaagcagaattaattttcactggctgttatgattcattcaaacccatgagtgaaaacactattaacaaggcgctacgtaagatgggctatgacaccacacaggacatctgcggtcatggtttccgcacactggcgtgtagtgccttaattgagtctggtctatggtcagaagatgctgtagagcttcaaatgagccataaggaaagtaacagcgttcgcgcagcctatacccataaggccaagcatcttgaccaacgccgcctgatgctccagtggtgggctgattttcttgatgagaatcggtatgagatggtcaggccgtttgagtttgctcagaaacaataatcaccttcctacaagcaaacaatcgcattaaatcaaaaaatacagggaggttttactctccctgttacttatcacttacgccctttgtttgattgtgccaataccgaagcagcaagctgcttcgttaattcgctagagcgtgggttatcaagggccgatgatgccttatgttccattttgccactggtctggtttgacgtcccacgttgagaaagcgcggaacccgcaaggcttttctggatggctgaggcattaggatcagtcagcgtttttgcagcagtagaagccacattttcagaagtctgttttacatttttactcattaaacgcatccccaaaagtcatgaacatcacttatgtagtgtcttcatcaaaaaaatcactatatgcagttataaccatattctttataagctttaattccactaaagacaacatcattgctgtataaaatcacagtatacgtgtagttaattgattttatttataaaaatattttgtctaacaggaacaagatacgctaaaagctcattgtcatcctgaaattgttgccttctgaaaatcagtggggaggccgtgctcataatacgcgaggaatatcattgaacatgcgttagctcaccagttagaagataaggccaaagcagagtatcaacatgggacgctatgggctaagcatgtggcattgatggatgattggacggggtatcgcacaagtggtatccaatctgtttatcaatacagtattatatatttacaacatgattatcatgcttaggtaattattttaaataacgtgtcttaatcggcatttattgcattatagtcgttattttccagttcatccattgaaaatgtttttctttcggagtctcggagacgttttaaactattttcaagaacaccgactttttctagatatttctctatgtctttaaattttgattcctttattatctcatatataggggataatatcatgtttttccttacaacatcatcttctttcatagaccgattataagcattatttactctcaatacagtttccctaagatcatctacaaaaatgaatatattattgagatcatcatctaatttttttcgctcttctaatagttcattatttcgcgcttcttggtttttgacaattatatcaagccgttcaagtttttcttttaactcgctcgtattgtattgagattcagattttattctttcaagttctgctttatgttttgcttcaccttcaatcatatctatttcatgttgacgttcaatcactctaatagagttcatactttttaccctacgagagtcccttttggaggaaagagtacagataatatctgtccgacttaagatggaaaaattctatcgctcttgataaaaaaggcattattatggttatgattataccgtaaacaataggttgccaaaagttaatgccctgcatttgaactatcgacgtcctatactcaatgttcccttttccaaacataataaataatatcttatcccaattatcaatacagaaggctgaaataacatatacatataatggtgtcgtgaaacgctcgatcaaggaactttttatgttattgaaaaatgattcctctgatgttttctcattgctcatatcaatcttcttatagaaaaattagtttaaaaagggacgaacgaaatactcgtcaactctaaatttattatctgtgaatgtatgaatggcatcaataccttcatgacatttccctattaattctctaagtatattttgcctttcagtttctgtgctttgacttacttcatccactacattaatcaatggaaaacttaatttattcctatagatatttttaattatttcaaaagactctttaaaatcatctctgatcttccatctatggcgttcaataatattggaactgatagttacaatttcaatttgtgtattagacagtctattggtaattttctccaaccgagtttccaatatatcatttggaattctattggatgtcattgataacaaaacgataaccaatttatgcaaatcaattctatattgaggatacagttcaaatatcaatttttttgcatcattatatgcttcctcatcatttttacttttgaaatagctcttagccttaaaagcgccataaatcgcagaaccggcgatcatcacattagatatagtattaatccaatctgtagtattactcatttcccaccatatcgtatacataaaacaataatcgattatacacatttctatacctaataataaatatcaaatgacattcattttaatgatattaatgcaaatttcataatgaaggggaatgtatccattaagaatattggagcaaaaatgaccaactaaacgcgtaaatttattgtccacgcgccaagcaacagtggtcattccgggcacgccaaaagactaagcacctttaccagcggagctaaatacttcaatgatggagatcatgttcaggtgttgaagtatagagttagaacggcctgataagaaagtcctcttttatcgatatattattaggtaaaatcaatcgcctacaagtacatagatagtgtagtatacaccatatgtaaatatctcagggagttaatctgatgtctataagcaccacaatgtcaaatatcaacagaatacaaaaagacattgctagtctacaaaaacaactttctgatgagcagcgtaaagaggcccaactttcaggaaaaatcaatcaaataaagcgtagcgtcactaagtcaacgtctttaagcacattgaattccaaaatgtcagagatctctcgtcataaaaatgatatttcaagatgtaactctaaaaaagcagatattaataaaaaaataacagcaaaaactggagacttacaccgttatcaattacaactcattaaagagcaagagaatgaccagaaaaaaagaattgctgcacagaagaaacttgaaaaagaacaattagattaccagaagaaaatcacacgagaattgaaatcgcagaaaagggcaatatctccaagccataaattcaatcgtccagtcatcaacaaatctgatgagacagaagatattacagagagttatgatgtttttatctctcatgcaacagaagataaagatagttttgtccgtccccttgctgagttgttaagagcaaaagggataaatgtatggtatgacgaattctctttaggctggggtaaaagtctacgtaagacaatcgattatggattagcaaattctcggtttggagttgttgttttatctaaatcctttatcaaaaaggactggacagagtatgaattaaatggtttgactgctagagagatgagcggtgaaaaccaagtaatactgcctatctggcacgaagtatctaaatctgatattttaaaattcagccctacactagtagataaaatggcattaaatacatcgataaataccattgatgaaattgctgaacagcttgaatcattattgaaatgaaataaatatttaagcgaaagggaactctccattggagagaatacatatcacttgggaaaactgaatcaactcattgagctgtaaactactccctatatattagacaatcagatatattataaaagtgaatatctttaaaagacacttattaaataatatgttatttattaaaagttaaattttattataatgtttaaacacaaacattaattcctcaacagttaacattattggcatgcatataatcttctgtaattactataaaagtgatcattctttccaccaccacaacgttgatcatcatattgagcaattaacgttcctgataaatagctgtattttgagctatatgccgatcccggacaagaacatccccttgtatcgctgtttggtattacacacttatagcccgatacttggtctgtgatcgtgatataaataccttttaatctatcaccacttactgtttgccacttaccactgacgcaggataaaaccttacccatactgtctcggcccaccagaccattaggcgtacatttcgcatttaaagtcgcctgatcattaaaatagtcattgtgcctgaacgatataattcatggcaacattcttaggtcttgtttcattacctgcccgaacgactctcgaagcatcaaacgtatatttccttacttcattgcttttatgaccttcatcaccttcacctaacgcaccactatccgcgaaagcgccactcacatatttaccgatgtttccactctgtgatacatcagccgccatatgacctgtaatattttgaatctgatcatcctgataagaattaataactcttcctgagtcaagtcctcttcccgaatccagccctcgaataaatactcctcttaaatcaggaagtcttcctcttggataggcttttgctaactgaggatatagggcagtattaaaagattgtcccctgcatattaaccaacctacaggcgctgtatttgaaggccaaggaacaggtgaaccaactggcaggttactgacaacagaccattttccattaacgcaggataatatatttcccatgttgtctttagatatcaggcctatacttggacatgtcccaccagttgtattcgtcgatgtaggttgtagagtatgtccctgaatatttccagatgctgcaatactaccagtgcttcctgtccccggagtaatagcaaaatcaccttggttggtttgtttcccaaaaacctgaagccttgtttcagtactggtgccaccatttcgccagatggttagcggcttaacagtatctaatctgaactcataatcgttagcatctccaccaccaatactgaaactatcaccaccaccgttatgaccattaaattgtccaccggatgtgatacttttacctgtatctaatgttccactaatcgttccattaccaatcgtagacagccctccactaattttcagcgtagtgagatctgttcgattgcttgccatatgaatagataaggtcttatccttagacatggttatttcatagtcgttattaacagcatcgccgccaaaatgtatggcatcaccataaccattatgcgctattatttcttgtgctgcgattattttccctgcggaagaaacatccccaccaaagatccccgttcccgatgcggtaatgttcttggcattattaatatcgttagtgcccatattgagatttccagtcataggcaatgttccatcgcgacgcaagtaaacagaatacatagaactatcatagcccacacggtaaaccagtaatcctgctttattaattgccgggtaatcagtagacttttctgtccacactccattatatcctgatgcctgagcaggcgatttcgtcataccgctatcaatacctgctgattgcatcgattttcctaacaggtcgtatcgcgtttttccaccttcgacccaaggtatcgtcgtagcaatcaaaccattgataacatagtttggtgatacgcctgatcgttttaacaggattttataagaagacttttgggcattaactcccgcatatgtagagggcaagagactttcattcaccagcgtctggtaagtgatttcacagccattagccgtacaggttcttggtcccggatcgctactttgactgcgtgaagatgacagtgtggaaagcttattatagcgaatgctaatataacggttaactgcttcgccaacctgtttcatttgaaagcctaccgcctgtgccattactgcttcctgttctttcctcatgtcctgaaacttcataaaaccaataagagaacctatacctaaaacgatggtgatctctaatagagtaaatcctcttttctttatcataattatatctcccatctgaaaatatgatccaaaaaggggcataaagtgcccctttaattaaatagacgtgaatactaatgtattacttgtagcgttattacatgctgcggcggtagctgctacatcaagggtaccatctgcagcttttactactttagaacccactttagcagtgtaaaaattgcctgccgccgctgtggttattttcacacattctgctgctggcacgttgtcatatgtgatagtgaaagaagaacctgccgcagatgacggacctgtagctgccgcagccagcgtcacgttccctttgaatgcgttaattggtttagctgcattgcctgttccacttaacatattatcagggaagatttttgcctgaacagctacggtattcgttagcccagtaaagctggatgctgatgtatagagtgctttgacacctgcctgtatggtggcaatattattactttccgcttgcgctctttgtgaagcctgaaccttgggatacacaataaaagccgctactactaatgcggcaataatccccagaacaagtaataattcgagtaatgagaaaccttttttgctttttcttttactatttaataaaaccattattatctcctttatttattttaatgatatctcctgttataacgcttctctcatttctggcaatagatggcgtaagatatatttaactctatctgatagacggatgaattgaaaaaggcaaagatcgctctttgccttttgggagatttaaatacaacatttattatcacagcgtttgtcattatcaccttcccatgagatatataatcatatccgatgaaaaagtaataatgacgtttactacataaagataaaaattaacagattactggtcgaacagaacgcatgattgattgaaaaggaaaaaatatgtattaataaagtattatcctgcgctctgttcttttatatagataacagatattaattagatatcaacccctgtcatgaaatttatttaatattttttatttttgtctgccatccatttgagcaagaaaccatctccctgcttttatatatttgactctttcaatatcattcaactcagatgctgaaagtaaaatccccataacaagttccttatccacctgttcgataccacaattcatagccttggctacttctgccccaagaataatcttaagccttgtttcaactttcttttgttctgatttctccattgactttaaacggttaagttcaagttgagcaaatgccaccttttgttttaatgttttttctgttcttgatcttttagtttcattatccatgattattacctcttattgtttatacgtatttaattatcacaaaggtaaataacgtcaaatttacaccgttttgtcagaaggaatagttctggagcatccataaataaaatagtgcaatacatgcgatagtaatcactaacacaaaacatctggcactctccgcgttacttatttttgtacttttgttattttattttcacctatcagctttaaactctatttttcaacctcaacctgtgaattgtgcaacacataacactctccgttttattagcttttttcttcaattttagctatcccgcctttcggcgggaacaattaatacttcttttgccattacgggccttttctttattttttcccttcggacgtgaaacctacacctttaatccagttcgtgtcgtttaatttaacgcatcattttacaactatcagtatatttcgtattaattaactaagggggagtttttacattggcttattttttaaagacaatgcccacctatacactgctacgcagtgtgtggggtctaccgacggttgcctgccgcaggctaaaagcaaaaccaacgtcaaccccgaagtttttcttacgtaaaactaacggcagcatttatatttgaggttaatttattaatggcgatttttcatctggattttaaaattgtgaaacgaagcgaaggcatgacttccgttgcgaaggctgcctaccatacccgtacacgtattacagatgatcgcatcggtgaaacatacgatttcagccacagaacagatctacatggtcatattatattggcacctgtttccgcacctgctcatattgttgaaagctcctcagcattgtggaatgaagttgaaagagtggaacgccagaacaacggacaaacagcgcgttattttgatgtcgctatccccgtagaactcagcaatgatgacaagaaaaaattagttgccgaatactgccagaaaaactttgtcgataaggggatgattgctgatatcgcatttcatgatctggacagtaaaaacccacatgctcacgtcatgttaaccctgaaaaccattggtccagaaggcttcggcaaaaaagacagaagctggaatgataagaagatggttgttcagtggcgtgagtcgtgggccacgatgtcaaacagctaccttgagaccgcaggccgtgaagaacgtatcgatcaccgttctctcagaactcaatgtgctgatgcccttgcccaagcagaagaagcattcagcgctgaagaaaaagccttctggcttgccaaagcaaccgaaacaaaccgtccagcaatgcaacgagttcatcgtgccaagtggaataacaccgagtcacaggaacagcgagctacagaacaagctttacgtgatcagcaaatagaggaagcgaagaaggtctacaacacattcagtgagctaccactggagatcgtggttgatgtcagaagctttacgattacacatcttgctgaacccgaagaaatcgttatccctgacttcccggctacaactaaacagcaacctgttatgacgacacacgccacaagcagaagaccagcaacaaaatcttaccgtaatcccaataaggtcagtaaagtaaatgtatcagggaagaaatctcccgttctgattgttcctgaaccaactgcatccactaaattgaaaaccccatctattcaaaacaccagagcgaagaaccgcgctccgatgaggagtaggaaacagaccaagccccgccagaatggtttgtttaaacgtttcacgctactgatagtaggatatataagagagaaatttatatgggccagaaggaaacccgataccactgatgctgaccatgataagcgtatcgcagagaactatgtctatgatgaagtgctgggtatcaatgttccacgctcggagtttgaaaaacgcgctaaatttaacaatgaccagacatcaccagaagcaagcatctatggcaatgaatcagaccatgacaaaaccgttcgttttccaagtcgtccgaaagatgtacaaacagagattgataaatacatagatctcataccatcaagcccctcagagtattcaggaaagtcccatgtttcaaagttgagaccactggcatatcgtaataataattataatgaatagcaaaatagaaaatacatttttatttaagctccataactggcctttgatttcaatatttttatgctgtgttcaaaaccattatactgcaaaaagttaacaatatcgctttctttaaatttattgtttggacctaatatcaattctgaaacggcatcttttgggaaacctaattcgtaatatgatataatttgattattggatattctatatttcagatctttaattgatgatgattctgggtattcatatcttcctgtatcaagagtttgataaactaatcgtacttctttttcctccttaaatgctgggtttttagtcgtggtatttaagtgaataatattggaaattaattcaaggatgcatttgtcgtagcggttaaattttgatgtcgatataatttcattcatatagtatttttttatgaatgaatatcttgataatatcctttcagctaagcattcaattacgttaatatccatataagatatatcgctaagagttagtcggtgtttaggatcaaggttattacctataatcccatcatagacatcgagcttttctctgtcgaatccgatggatacaccaaagccatcttttgcatacgcacgccattgacttaaaatatccccagatttagatagacaacaagcaaatggtgttccaatagatatattgtcatccaaatgtgctataaactggtcaacgcagttagcatctaagtttttatataaatattttttaagtgtagagtaaaaccactttttctccatgtaatcgttcatatgatccatagagcttagccataatcgctgattctgaataatactgaagaaagattcagggctgcaataatgatagattgtattcatcttattcaaagtccttttataagagacaatttctaaaatcatcataccacacaatttcattaccagcacatctgtttctaatatcagggagcaatttgtcaggtaagatgcgaacctgatttattaaggtctcagctcaaggtcgattaagggcactctatccaatcctcttatatagatataaaccatactcctataaatcaagaatatggtttttgttttatgcttaattacattcttcgcctaaacactacattatcagcaaaaataactttgccagcaacaaaccctacgatagcaattatcggaaggctgatagtagctcctgccataccgatcaacgtcgataaaccaaaagtcaacaacaaaacaacagcagcataccagccgggataagtgccacataacacagtcgctaagcaacctgtgcaaacgtgaaccccacgctggctctctttgaaacagaacgggcatttgatggtattgttttccatattggtttccttaattggctttccagccattgctggtcttaaagagattcattgcaccatcagcaggttcattcattcctttaacactggcgaatgcctttttgtcaatccagttcggaacgtcaaccagcttccacgtataagacacacgaactactttctgattaccgtttcccggctcagtccattccttaatctcgtcaacagcacgacgaccaacacaggcaccgtctgttgtgctccagactttggcttttttgccttcctctgttatccctaatacgttcgagtcatagccctgttcaaaaaccatcaggccctgctcaataaaaccgtcgaggatcactgaattcgtccctgtgccagtcgaatcaagccgtggcttggcaagacggatcgggaagctggtgttattgttatccagcgagaagcagtatttgtcctgcccaatcttggcattgatcgctttctcaaactcacctttctcaccacatcccgccagcgccagagccgcgccagcaacgagtaaaatcttcttcatctgcttatccatcctgataatcaaaattgcgtatattttttgacctaatccggtcagggctagagttgttgcgggatccggctgatatcacatggcaaaaccaccgcttaaccaattgataggattcaattcttttagcgtctcgtcatatcgtttaaaacgatcaaaaacaatcttatgatagtttttaactatcataaatagatattcgatcgataataacaattaataaccgatcgatatcacactttcaatcgttataatctatcgataactaattatcgatcttttatatcgatcataatttcaagttctgatagccttgcaacgccgagaccgacgccatgagtttggtgctgtaggacgtataaaacgaagcaaagctctgtgagcgggttcagtctctttaactcatttacatggaggaagtaagagtggaagcaacaggtatcgtatttttagtggtgctcttcgtcattatcatgaccgcagcagatatacagaagaaaaagcactacaacagctttacggaagttctggacggcgacattctttcgtatgaatgccagcagacaggtattgttattgatactcaaaaacatactgtccgtattttcaataaagataaagacagcacatatacttttgatgaaatccgggaaataaattatacgctttcagagggtggtaagttttacggcaatggaacattacgaggtatgaataatgcggctattgctaactggagagaacaactttcagctaataaacggtctggtctaaatattttaccgatgatattaaaaatcccatgtggaaagttaatgttcccctgaaaaataaaagcacctcaaatcacgaactttgcgagcggtggatgctggtatttaaaaagtatgttttctaacctgttacctttcatctatttatagaacaaaaatgaaaaaattattatttgctatttttatcatacttccgcttggtggctgtaccgttcatggtaataaatctctaactgatgaaaatcatcagacggttaaattaaaaatcgtcaagggtaaaactacccaacgagaaattcttgctgcctttggagaacctcagacacgcgctacgaatgatggacaggagatgtggaactactcaagtatgacgggagaaagccaattatctaactacatacccggccttgccctattgaccaatagcagcacggcacacattaaatcactggatatctggtttaaaggtgatgttgtggaacgttataattttagtcagacagccagtaaagttacacgaggtatgattgattagtggtttcattttatttttatgaaaactaacttcatgagtaagatcatttcccaaggaagtgatcttactctatatgattagattatattctttctaacactcaatactttttcaacataatcagtttcgaatttactaacagatgcagtcccataaaagaattcattattataaaccattcgatgcttagctacagcatcaagaataaacctaaaactaaattgcctctcgatatccatcatcccactataaaacatatcaagtgaaggcatccaatcgtataggtaacgacattcatcaagcaccaacatatccatatacatattggtgtcttttgctttgtatttccatctcagtgttttttccatatttacatgataaggtacggataactgtctgaataaaacctctttaatttgatgaaacaaaaaaagatcacaaaatggataaactttttgataccaatttattttattgagatttcgcagagaatcactatagaaattattctctgtacgcccttcatttaatagaaagtgcatattagaaatgttttttattaaatcatgagcattaccattagcactcatttgcgataaaaaagactgagcataatcgttaaaatcatcatcgcaataaatatcttgatagtaattcttatctttattattgtattttttatctattgatgcaattgtccaaaggattggaaatagccctgaatcaactataatatccccaccattcccattactatcaaaatgaaataaatcatttacgcttttagttagatcgttgtaattagaaattttaaacatatttttatataaagaatgcgatgaggtgaaattatcatatggagagatcaccgaaatcagatcaactaataatctcgttatatactgcccatagaaatcttcaatttcacattcaacttttttatgccactcatcaaggctataaccttcagaaattgcaccatcagtacagttccattcaggattattactctccagtgttgattttggatagagataactcgcaactaaatttacgatatttttatgttcattcgcgttttgttcttttgacggtagacttacatttgttatcataacaccaagaggtgaaagcgcatgatattttaatattgatgttattgcctttaatgttttctgaccagctttcttactcggcaatggcccacagaaatcaagatatataagatcaaatttctgcggtgacacctcaaaaaaatccccaacattagctttaattaattttataaacggaaattttgaagaaagtgctgaaattacagcctcattatatattttagcatcactttcaaatgcccaaatattttctggcaaaagccccatatcagtcatttcagttaaatcattttcagggttaggcccagataaatatgcgactttaatactacgtgcagtcctatcctgaatcactgaatcatagaattcctcccaccgaattattgtttcctccgataactcatcaacaataaacgcacgtggatcactctcgtctttcctataaaacgctttaacttttcgaatatagtctttaggagctaaagtcgagtcttttctacacaaagtaagcgcctcaatcgcagcttttaaaacacttttacgagctatatttttattttcttctttatacattattaaattccactctatgatttagcattcacattttagtaaaaatatcaactaaggtataatctgaatagactcagacattttaatgttgccaatgcgtatgggcagcccaccttcttgctggcataacttcttaatggattgccactccgctttttcagactccatgtgagcagcgagcgaatcaaatgcaccttcggctacaacgatggtaggttcttcatctgtttcattgccagtcgactccgcatttggattttcagcgcgttcttcttccagttcagccagactcgctttcagctcatcaagactgctggcggcgtcttttggtgcatagaagaacagcccgctaatgaagatggcttccataacctcactgaaagaaaacgaggtatcgccataaatgaagcaactgtgcttcgaactcttcacacccgatatgtttttcttcaacaaaccgtctttcggtgaagtcatcaatgtctgtttgctatagaggattacaggcagattctttatctcgtgaacatcaccactgatgctccatcgttctttatcacctttaatgaagccagaagcctcacagccactttcaatctcaaattcatctgtcagaacgcgttcccggtttaaatagtcagaaaaatcctctccatcctgcatctcctgacgtttataagcgcggtaaaccatgctacggcgatcaatcccaatccattcaatatcccatgtcgttggcccggacggttttcttacctcatctatataagcaccaacatctctgtccagataagccgctaacaaagccttccacggttctattgccagaaagatacttgccagcgttgttccttcttcaatcagaacggtatggtggaagaaacggagaagaaagaacggatcggtatcggctatgacgttctggatggatagcaatggaacggcagcggtttcatcgtaatcggactgaaaccgtagtattgaatcggaacaaaaaattaactgaccttccatcgctcatcctcctcctgtagttatcagattaaatattttaccagatcataggttgttatagcattttactttttgctgcttcatattcattaatatggtccttaaaagtgcttatcgcttttggcaatgacctgttaagtaaaccattaacttcctgtgatgcttttccgtttctgattaccacgatatatccaagagttagatcttgtcttatcattggatttaatggttctatgcctatgctaatccccgtgtttttatatttagcaaccggatacccaactgaactgtggataacaatattgccgctatctgcaagccttgataatattctgtcgctgtatattgtttttcttaaatcctctaaaacagggatatagtgtctacccatgtttcctgttaaagttgtaggtatatagatctttgtttttattttccgcatgacatttttcctgttatcgtttttatttaataccatgcaaccagtcgtaatatcaaaaatatttatgatattttgataaatattttataacatctgtgattttatagtttcttcactcatctgtgtgagttctgaaaccaagcgaatataaatatttttcaacctgtctttatcacaacgacttacagaatctgataaaagataatgactataattattgacacaaatgttgttgccgttttcaagggttaatttcaatccgtgttctgtatcttctactttgcttacaatacagatcataaatggtgttttgtcatgtggatggaagagtgtgatcattttgatattgttcattgtattttccttttattattttattactgtttaatactctatcgtaagcgtaaaaatcaaatatatttttatttaatttatgattttactactgattattaaacttctttttgaaaagatctttatctctgtgcttacgcacggctacgccctaaaactgacattttgtattttactactatgaagtaataagcgaatgtattcgatcatagtcagttctattttccttttaaattttaattcggatcctatgtttaaacatagcattccccctctgacatatagcatttgctcttaaatgtataggaaaactatatctttagtagcagcacttcgtgattgttgccaacaatcactttgctggacagggcttgcccctgttaaagatgttttttcaattaataattttttccatataaaattagtgcctgtaatcagttataagagctttaagtgtgaagatggttatatgtgttatatttctgttcccaaggtcttaccaagcttcctgtgcggtttattaacagtttatagaacactcttacttatgcttattgatatttatttttacctgatacattcaattattattttttgaaaatacatccattgtgctggcgcacggctacgcccctgatactggtataaaactattttccttgttcacttataagttattaatattttatcaatggaaaataaagcgatcagtataaagatcattccctccaccgagttagaactcagatcttatgcttgaatataccatcttccctctgacatatagcatttgctcttaaacacataggaaaactatatccttggtagcagcacttcgtgattgttggcaacaatcactttgctggacagggcttgcccctgttaatgatggatttatccaaaaaaagatcgcggcgtagacgctaataaaacaaaagaaatcttaattaagctctcacaataaaagcagcggttcgtgattgttcgaaacaatcacttcgctgatagcagttattaaggaatacaataccctctgtaaaaccactaaaacataacgcaaaagtaaaactggactctcttaacttcttactaattatttaattataagcatagtcccggaccagtaaaatcgcggcttcacaacttttttcctatgttcgaacatagcaaactcctatgttcaaacatagatccgtcctatgttcgaacatagcaagatctatgttcgaacatagtttttttaacatataacattgtcataaaaatatactttctattttatttatagttctactattgactttcacttttttgcatagtattaaaacagatataacaaaaataataagagggaataatatgaatacaccagatgctgatctattacacttatttgaatcattaactaccgagcaaaagattgatatcgcaagacgcttactacaaaacaaagaaataaaatcaacaacagtcatttcttctgaggaagataaagctatttcgttttcacaaccttatgtatttgcttttacttccaactttcgtgttttctctgatcttgatatatccaagaatgaattccgtgtattaacctatatcttggagtatatggagtttggaaatctgatcaatctttcacaatcatcgctgtgcaaagcattgaatatcgcttccggtaatatgtctaacatttttaaaaaactcagacagaaaggaatactcgtcgagcatcatggtcatctctatatcaactctaacattttcgctaaaggaatgagtcatcaactggatcagaaacgtaaagaacagttgagcaacgctcgcaatctttgcgcagaaatagaacagtatccagaaagttattcagctatgtcaaaaagtgaaagaagaaccctattcttagaaactgaaacaaaagaaatctatactgacgcatttgttttcagtaagaagaaaaagaataacgctgttcctaatcccaataacagcatacatgttgataaaccacgaaaagtatataaaagaacaaaggaaaatgaggaagcaagaagaaacgctgttgacgcagactctcatatgcagaaagtatcctgataaaataacaacaacaacaaggaaataacaatgaaaaaactacccggttctcttgagattaagctccacgaaaaactatccaagagtgatatactaaatatattagctgagcagatgaccatgcttgaggaaacatttggcattcaggagtttaagattttctcttatcttgaatgctatattggagataagaaaaaagcattatattacagaagtcgcaacagtgccgtagccacattcaaattaaagggtcttgaatcccctgtgaacacggctaaactcatatcaaaagaaaacggacaacgtattgtttcctttgataaagatctggatataaacagaatatctgctacagtccgaaacatacaaaacaataatccttatcgtgggtggtctgaaggtatcagtgttgttcctgcctcaatcattagtaaaataattgaagtggatataatacgcgcgcaggaagaacaaggcagactttaccgtattgaagaacagcgcaagaaagaagaacaaatacgcaaagctaaagaaagagaggagtatgaacgacctttaaaggcttttatttcttcaaaaataaaagaaagtgatttatctgagaaggatttcaaaaagcaggtttgttcaagctgcgactatctgaaagatcgctccacaaaatcaagatattttactgaacgaccagacctgttagacaaatatcataatgaaagattaattcgtttctcgataaaaggcactgatgggaaagtaggaaaaatagaaatttatacagatacaggcgagcttatttttgaacggtataaaaccaagtaatgtttttatgcctatgccaatttgacacctgaaccatatctcgtaatataaatatatccactattttatttccgaggtattgtttatgagaaaagtaaaaacagacaacagtgatttaatcgaatacgtaaatacagtcaaagaactaaaaaatcatatttcgatagatgaatacaggaatgaatatcgtaggctacgctctgatgacattccattggttaagtctcaaaaatttaagtctgcacatactgagcttcgcagacttgaaaagaagagagaatctcttattgaatactttattgacgagttaaatcctattagcagttcaaaagctaacacatcagcgagatcaactggtaatctcgatttatttaacgaacgcgtgttataccgtaaagcactttcagaaaaaagcgatgaagaaataattgccttagtcataaaacagcgtacagaagccgctgttgagttcaagcgttccatagaacaaagcctgaatcaactctctcacatctcgtcagagttcgccccatcaagccagaagcgcaggaaaatgtctctttaaagaaatgccctatgttatccgtgttaaataggatgttttaagattgcttaatcaataatatttactatattatttactggttggtattttttgactgttcaacagcattatatacattaaccttattaatcacctattttaaaacaccggacaacatactatgagtgaagctctcaaggcactgaacaatattcgtacacttcgcgcacatgctcgtgaaacagatctggcaactctggaagagatgctggaaaaactctccgctgtcgttgaagatcgtcgtgaggaagaaagtgccgtccgtaaggaacaagaagaacgtcaggctaagctggaagctttccgtcagaaactgttagaagatggtattgacccggcagaactccttgctgctgttggctcatcccaacctaaaaccaaatcgacccgcgctccacgccctgccaaatacaaatatacagatgaaaacggcaacgagcagacttggacaggtcagggtcgcactcctaaagcgatcgctgctgctatcgaagcaggtaaaaaactggaagacttcgcactctgatcacaataaaaccgtcaatctaatttggcggttttactttcgttcgctgtaagctctacgtaatcaaaacgttgattacggcggccgatttactgaaaagtggtgtattgccattttattagtctcaggacactgccagtactgaagatagagactgccaaaggaagagaaggctctcttggattattacaaacagatcttgatgaattgctggttaactataataatgaataaattcatcaggggaaaatgggctgtggccggacaccaatgaaaatattacctgatggaaaacgcattcgggctaaaaagaatttaagctaaatagaatctgacagatatctgtataaataactgataactgtcagatctgatttgagccaatgcgaattatctaatctatgaataaataaattcatttccgtttcaattcagtgggaagaaatttatcaatttcctcatcagagaaagtcatatcctcaagttccttcagtgccttttgagccattgaatatgccttgtaattcgtggatggtgctccgatataaattgcagaaagttcaatcatcaaggcgtctctttctttaagaatttcctcgatacttttagtttgcattttcaagtctgtgagaagagataaatatctttccctgattaaccacatatccccagcagcttgtctgtgtttttgagctatagagcctaaatcataatcctttaaatatgagtttaaaaataggaggatagcggaaagtactgacccaattatagcacctgttttagcatctcccaccactgtagttataaaactaccggtagttattgctaaaagaactaactgtaaatttttcatgcagcctagttttttttgaaggatatctgcacatttctcgtgagttttatgtgtgtaaacgacccttccatagcattctcttaattgcccttctaatatattattatccatccgactcaccattatcatatgttaggttaatgttagtttaacactaacctaacataaagtgggactaattatgtataggtacgtcgattctatctcttgctacaacttgattaccataaataacataacattcaacaaaatgaggtcctgagaaatctgcggtctcgaaacgctcagaaccgccttcatcgtctaaaatttcacctctaacatttcctcggcgctcagcttcatcacctacattttttattttccatttaatcttatatgggtgagatatattatttatctcatcaacatagaatcttaacttgcgattcgtgctaatatcatgcccttcgccaagaagatttgaaagaagagcttccagtaaattattctttctaatctcacattctatcgaaacatgaccatataaattcatctcatattgatcttcaataaactgttcagatacattgacattactgagtgcttttgtcgtataatttggaaaaggcctgccaaaaacttttttccaagctaagtttcttgagttttcacttgtagcagataaagcttcttcacaatattcttttgttaattttgctactttattaaatgatttttttacgctcacttttgagcgactaccgggagcataataaaatactcggtcaccttcattctctaagaaagtgaaaaaatcaagcgaaagttgatcataacttttgaaactcttatcatcatattcagttagattagagaaaaaattataacacagtgtatcaattaagaatccacttatctcaacttcatgacgagctttccatgctcgaatcattttagatagacgtctcagatgtcccttcctatcatcattcagtgccctaaaagacgacatttcggccctagggttacataccttccacgatccaccatcatgtgtatccgggtatgtaaaagtgccatcttcattactgaatacaggaactacctcaacctcttgattcttaaatttaacaacaacaacttgcccatcaccgcgaatatctgtatttttgaaagttttcttgatttctgttttcacaacctgtaataaatacgattgtcgatctcggaatcttggccatgcagttgcaggtagaaagtaaagcatatcaagatcagagatccctcgaatccctgtgaagcgcccataggaaccaacctgtagtgaattggctgtcttagaatctaagttataaaagtattggttcaaagccttagttatacgaccataccttttactaatctggcctgcattatctatttttatattgtcgaggagtgtcttaaagtcagttgcggtgctcatgtaatttccttgttaaggtcatcaattacatatgcttccataaaagagattatcaatgtgtaatacgctaattttctattaaaaaatgatctcaatcaaatttatagttataaatagagtgccctgaccagttgtcagacattagtccaaccttcgaacagcagcaaaacaagtctcgccgcagaacagcaccttaattgtccggttatcagccccatgaaggggccggtatacgtcagaacacatcaacatattgactctgccagaacggtgtagtgcattttggctaatgcctgcttaacccctttaaaatccacctctgacagtttttcagcagcgttttttttccatgcttttttcagaagatgcttctcagcattcctcattgccagatcgattagcctacagacaaactcatgatccattacatgcgtcataatcatattactggttgttttatcctttgagttaaaaagctccgcatagatatgcaaggacacaacataaaagatttcagtagttttatttttaaatgtattcattggcttttccttttggttaatattaaaaatgaaatgctgtagtattagcggtatacacacttatagataatccaaagctgacgaagatgttgctttaccttacagtgacttacttctccataaatccgattccttttgccttcttcggtgtcatcataaaaataatatctcgtttttttaatgatactttccataatgtcattcatattgtatttattgttgagaaaataataaaaatcatctggtgcattcctccgcaatccgtccatatagttcctgaaataacattcggcttgttcaataaactgttttgttgtaataagttctatcttcatgtttttctccattattgtttagggtaataagatgccctgtacgaacagatatctgttcgacacgagatcctatttctgtttttatgctgcgttctggcgtgagtttcgaatagtcgcttcaatccattcatcaatctcactttcaatgaatgccactgctcttatccctgttttcacctgagatggaaaacgcccggccttaatcagttcgtaaatccacgttttaccaaatccggtgcgttttattacttctggcaaacggataaacgttgtctttgcttttatttctcttttaaccatatttatctcctgtgttattcgatggagataattgtatggagatcgcttgtaaaaaactaggttggttcaccagtcctgaaccggagggatgttcaggaccagtgagtttaggggatgtttatataatatgaatacaggggaagttcagggttagtggatgtcccttgttttcttttttgtttctggtttgtcattcattgcgatgacatcaagaataggtgagtttttcaccagattgttttttatgaaaaaatcattcagtgacttgaaataattgtcattgtttaaaaaaccgtgggcaagcggataatcagtgtctttgatttgctcgctacctctggcataacgcatatcagggtgcaggataccagccaatacagggtatttgattttctgattgttgagctgttcccaagctatgaggtccatcagagggataatcttgtaatcgagtatcttctggaatgttttatgaccaaaacgaaaatctttttccggtggtttaggcactttcaggtgcttctgccattgattgataagcactttcaggtgttcagccagatcgtcgctactggcttcttccaaatcaatttcaatcagcatcttgttagcagggttcagccctccctgtttcaggtattcagatatgtaatccgaactcactgaaacattttcttctggaggtgtattctccagtcgatacattgcccgtccatagttaaacagtgaatcccttgtcattggcctgacggcatagctatgagccagcatgtggctatcagagatccatttatcctccagcaagaccctgccagagtggatcatcgcatcatggtgaataacggcattacgatgcttatcatccagtgtttcccattgttgtctggctttgtaggcaaacatgcgcctttccagttccgcataaatttgttccagagtgaggtttttcagcgcatcatagcggctaacatcaaaccatttgcttaatgcttccactatctccgcgacaggcaatctttttgtcattcttttccctaaaaatgttgatgttcattacattgacgttaacgcatccagcagcatagagaaagggaataaagatggctggctatctcagcattggtcataacgtattcttctgcccttacttatctttccgggaggaaacatatcgggcaatagcggtaatctgttgaataaacgagataaaatttatagcagcacaggaagatcgttcagtaaggttcagtgaagtgtattgtcataactaattgatagtaattgactttatggtaatacagcattaaaaatgctggtaaatatgatggtaaaaacagacgccattttttgaaagccactaacagcaggagctacagatgaagttcgagtccagtcagaggagccagattttagtttcgggacatcctggcgagtccggagacgtttaaaaaacaagaaattatctttacccggttgatctgataaggtttgccgggttttttgacatccatagtttttggggcttaatcggggcctcacggttcgttgagtaaatagagccccctcctatggcattaaccgataccgctggcggcacgcagaccgatccgggtacaggaaaaccgtcagaaaatccacccgccgatccaccgtcagatggtcccgcttctgaaaaaccacacgacccacccgccgatcccaataagcccactccaccgaaagaagaaacgccgcccggcgcgccggagaaatacgcgttcaccgcccctgaaggtcaggaactcgataccagcgcgctggcgcagttcgaaccagtggcgcgtgaactgaacctgacgcaggagcaggcgcagaagctggtggacgtctatccgaaagtgctggcgggagtgcaacaacagcaagcggagtcatggcagaagcaaacagaagactgggctgcggcagttaaagccgataaagacattggcggtgacaagctggcgtctaatcttggcgcagctcagcgggctatcgacacgttcggtaccaaagaactgaaagagtatctcgatggtacctgcgccagatctctggtcaatgctgcaccgtgacggaagcgattccacccggcacctgttaccacatcagcgccttttactttacgggctgcggcctgcaaagacgtccggctttgctgccgcgtgaccgtcaatctgcgccagaatccgcgatctttcgcgcccggcactcaaccggtgcgtcactttcgtcgcgcaaagcgacaaagtgacgcacaaccactacaccgcgccatgcccctgttttcggggttccggcgttcattcccgaatctgacacgcctttttggggccgctgtcagcaagaaagaagagaaaaagatcgataccgaggggggggctgatgccccggagaatttctgctcacgcaggcagcctgtaccgcgtacagtctgaaactccctatacctcaacaaactgccactccggcgtaaaggtatcgttctggcgcagccaaagagcatacgccggagactgtttgtgttctcaaaatcataggagaagtgtatgggcaagttaggtggtgaaatgaaggcactggcaaagcactgtggcggtagccataaaacggtgaacgattgcattcatatcgtgcagcgtttcgatcatcacttacgggctttgaacgtccatatgcagcgggttgcgcagattaaggtgcgccacattgaaagctatattcatgaaaggttggcgcaggggatcggcaaacgcacgctgcaaaatgaaatggcctcgctgcgcgctgttctgcaacaggccgggcgtaaacaggtggcagagcatgagtggctgactaataaatcgctgggtctggctggtgcatcgcgcagcgggacgcgacaggcgatcacgccggaacattatcatcatgtgctggagacggcccgcatgaaagatccgggactggcggcggcgctggaactggcgaggctgatgggcttacgttcacaggaagcggtgcagagtgtgcaatggatctggggcatggggacgggcgtgggcggtatgtggcgcaggtgtatgggcaaatttgacagctggctaagagcgagcagcggatggagcaggttaccaccgttcacagttagtgaaagactgggcggaggtggtaaatatcaggctgcattaccttcccccttacagtccaaacctgaatccgatagaacgaatgtggaaattaatgaacgaacatgcccggaataatcgctacttcagcagtacgcgagagttcagggacgcaatatctgtcttttttaaccagaggctgccggatatagcggactcactgacatcccgaattaaagatcactttcaggtgctcactcccgcatcttgaggtttattgggtatataatcgttaataatcatcagcgcgttattatcaaattaaaaacaacgcgctcgtaatacttaaattattcttactggtaactgaagaaaactctctcctgccagaatatgctcctcgcatcctttacattaactctttgtttctatagcatgaaataagtttcagggagttattattcatacaaggagaacatcttgaagaaaatattcataacaattatagtttcattatattgcgcgaatatatgtgcaaaacaatcccccagtacagaatccaaacccgttaatttcatcgcccaaattgaaaatatcgattttaataaaaccgccattagcagtgacctgaaacttttactcgccgaccgttattattttaaagataaaacaccctgtaatactaataccctttctgcgcgcgcagaatcaatgggactgacgacagaagaatatattaataaaatacgcagtttaagaccggctattctcgatgaccgttatttttacctgacggtcgatcagtgcgatgctggcggcacgcccatgctgactggaatcgagctatgtaccgaagcgctgtgcggtgccgaatacatgaaaagatcgtctgacttgtggctggatgatgaactgcaaccgacggttaaacgtcaggcaacaacagtagtccatatgcccctcccctatgacaaagagaaaaaattatggaaagtcaccggctggtatctggaatcctcagaagaaacaggggaggtgatgcagagtaaacagatagcctttgaaggctataccaacgaagaaaacttcgctaaccgacaacgtgtttctgtatttaaatctttctatgaaagcggcaatctcaaaaatatttatcattataatgcgcaaaataagcgtgacggaaaagctgaaacttactttgatgaaaaagacaaaatagcggaaacgctgacgtttaaagatggtcaacccgaaggggaatacatcgtataccatgaaaacggagccgttgaaagtaaacgttactttgcccaaggtaaaattaaagatggcgaatgcccacatttttatgataacggcgttttaaaacaaaaacacagctatttaaatcagaaactggaaggcccggcatttgaatatttccctgatgggaaaataaaggggaaatattcatacagaaaaggcaccattgtcggcaccagtacggaatattattctaccggtaaaattcgtggtgtttaccacagaaataaccaaggtgaaaacgacggaacgttcgaacaatacagtgaagagggcaaactcctttctaaagcgacttataaaaatggcaaacagctttctgctcagagctggtatggaaatgggcatcccaaagaagaatcctcttttgatagtgaaggccgtaaacatggtgcggtcaaagaatggttcagcaacggaaagcctgcctcatccaaaatgtataaacatgatgtgttagacggggattccgaaaagtggtacgaaaatggtcaccgcgaatcagtctatccctataaaaacggtatgctaaatggggatgctaagcactggaatgaacagggcaaactcacctataccaccgaatataaagacgataaaaagcagggagccgatcgccgctggagcgaacgtaccggtaaacttgttgaagaggttatgtttgctaatgatgaaagaaacggcctgaaaagagagtttaacgatcgtacgggtaaggtcttaagtgcgctgccctatgtcgatggcgacaaggaaggtacagaagaagcctatgatgaagacggcataaaatacatccgttgttaccacaacgatgaagagctttcagagctatatgcgccgactgacgtcaccaataaggcaaagcagggtgacagcactgcgcaatatcatttaggtaagtatgagtttgaatgcacaaactacgatgcggcgatgaaatggttaactcagtccgcagagcaaaatcatcccggcgcgcttctctttttggcctatgcgtacaacgacggtgatggcgtaacgcaagacagcaaaaaatatctctcctatttattcaaagcggcagagcttggcgaaagtgatgcgcagttagaagtgggatatttaaatcttatcggcgaaggaatgccgaaaaacctgccggaagcctataagtggattaaaaaatccgctgaccagggaaatgctcaggcgcactataaccttggactcatgtacaggaatggtgatggcgttgagaaagacctcaacaaagccaaacttcatcttacagcggcggtaaaaggcggcgtcaaacctgcactggcagccttaaaggaattaacgcctcaaactaagtaaatatgactttgctgtaaagaggctattcaaacggaactgaaaggatacacgttgctatgaaatttaaattcgccacattactcacagccgccacggttttttactcttatcagagcgttgcacaaagtcagcaatcgcctgatgtctggtcagttgtcgaacagaaactgcaaaatgccgtccctttaaatgaaaacaccacttttaaatcgcaggcagcctggtttgaattacacagggaactgtttatgtacggcccgatgagccgtgcggatgcattactgaaaaagctggacacacaatcgaatgatgcgaagttttcgctaaaccatgaggcctcgtggatcgctgaaaataatagcccggatgccgcgatggttttcctgtccaaaattggtctcgataaaccgtcgagcattaccgcctacgagagctacgttgatggctgggttaatcgcaaacagcctgaaaaagccttagcccttcttagcaaaaatgccgacgcgaggaatttttatttagccacggttttaaaatcctggcactcagatcctgataaaaccgccgctatttataatgaaaattacgctgataaaattgttgttccttatactcagctaaaaatgctgcttattattgcgaagcagtaccatgccaagggcgacaccgcaaaggcgttggtttacgcagatagcgcgctgaaaatgtttgatacggctattgctcaacaaccgagtgctgaagcctaccgttatcaggagtatctcgacctgatggagatctattacgccacgggtaataaagagaaggcgatggcgttgtctgcgagattgcgcaaagcaaccggcaataaaggaagctatttccagtattcattaccgggattgctctctttttataagaaaaacgagctgacacagaattatcaggagacgctttcaacctatgtgacgcaggtcgataaaatattcaattttgccccttcgccgcgcattgaaatggagctgattgatttattaagcaagcttgatgatgttgcgctgatgaataagcgtatcgatttgctgatgagcgcgccggaatatacctgctacgacgacaggtattgctacgagtacaaaatcaaagcgctgaagaatctctttcagcataagcagaatgctgtggcggaaaagcatatcgcaaccctctccgccgaggcgcaaaccctgacgttcgccgaatgggaagatgcaacaaatgaaataggtgaagtactcaaagaaattggccatcctgaggcagcgcaaaaattagccgtcagcgccgaggcgatttacctcagccaagcaaaagcctggcctgatgaagatatgtcgcgttcctttcaaagacttgcagagctttacggctatggcaacgacacggtgaatgccaaacgggtgttacaccagcacgttccctctctcgaagaggaggcgatgatcgaccactacatgaatgcaaaacagtggagtcaggcaagggaattgatgattaacgcagatagggtcgataataaaaacctgatgctgttacgccagatttgttctgaaaacacgcccgagtgtcaggaacatattacctttacgctgaaaaaattaaccacgcaggcgtcgattacccgccaggacgacaccggtaatcagcagctttatcagattgggaatatttttcacagattgggtatcataccgggagcggaacagcaggcgctgattcaggcgttgtataacaaggccgcagagcctaaaaaagccacgccttaatcgatttacccgcccggccacctttctcacatgcgggaaggcggcgggcgggaaaaatcaatcgcggaagtttttgaactggaacggctggcccagattgccgccgcgcatcagcaccatcgctgcctgcagatcgtcgcgggatttaccggtcacacgcactaacgtaaattcgaatccaaacccacagagattaccgcaagatattaatgttgacccaacaccgcctgccggaagacccgcgctggaacgccctgcacgaggagttcagctttgacgacgacgacaacctgctgggcatgaacatgccgcccgaaggtggcgagcatcaggcgaaagtcaaaggcgaccgcctgctgctacagggcagaccaccactatgagtacgacgagttcggcaatcccatcgctgaccgctggggcaaggcgcagtgccgggagcaccgatttgaatggaacggcgagcaccggctggtgcgctttaccgacgtgcgccactatgatgatgaaggctttccgcgccactcgtggcgctatgagttcgataatggcgtgaccaccctatatccctgtccgacgcgaaaatcctcagtatcaagccttctgataacccctttaagctgatcgattctcacggtcggtatctgcttgttaatccgggcttgtgggtcaggcgctcaaggagcgtgaagtgtggcgcaatgttttcgccttccggcgcgtttcctggcatagacgcggttatcggcgacaggtatccggcgatggtgatgaagctcgcggcacaataaggccttagcgggatgcagaatcgcctcccgctaaggcttcattcagccgctttccatatcacataaatacgcctcttccactcctgtccagcagcaggcgacagctcatttcgttagcgaaacggtggctcattaaacgtgcgtaatttacgtgagtgcaaacgatcaccttctgcgcgtagtaaatcaatagcacgaataccaatttgcaaatgttctgaaatagccccctcataaaaccggtttgcctgcccgggcagtttaatttcaccgtgtaaaggtttgtcagaaacacaaagcagcgtgccgtaaggcacgcggaagcgatagccctgggctgcaatcgtcgcgctctccatatcaatcgcgaccgcgcggctaaggttgaatcgcagcgccgatgcggaataacgaagctcccagttacgatcatccgtggtgacgaccgttcccgtgcgcagtcgctgtttcacctcttcaccgggcattccgctaaccgctttggtagcgtcgtacagcgcacgctgtacttccgcaatgcttggaataggaatatcaggcggcagaacggcatccagcacatgatcatcgcgtaagtaggcatgggccagcacataatcaccaatcgcctgactttctcgtaaccctccacagtgcccaatcataagccagacgtcaggccgcaacacggccaaatggtcgcaaatcgttttagcatttgaagggccgacaccgatatttaccagcgtaatcccctgcccatctgccgttaccaggtgccaggcgggcatctgatgcttcttccaggccagatcggaaatagcctcttccggcgcttccgtttctgccgtgatccaaattccgccggcacaggaaagcgcgatatagggactgtcaggatcaagaatttggctgcatccccagcgcacaaactcatcgacatagcgggtgtagttggtaaacaaaacgaagggctgaaaatgttcaaccggcgtaccggtatagtgccgtaaccgggccaacgagaagtcaacacgacgcgcgtcgaagtgcgatagcggatagaattcgccggggtggaacagaccgtctgccgtctcatcgccaatctgcgccagttctgtggtaggaaaatggcgcgttagcccggcgctcatagaacgatccagcgtcagagccgagccatcgatcacataaggatacgggatctcatggtgcgaggcctctaccgcaatatgcgcgccataatcatggtaaacgaggttaagctgttccagaagataagcgcgaaatagcgcaggccgcgtaacggtagtggtataacagccgggatgagtaaagcgtccaaaagcgcgtgttttaggcgggttcggtgtcgcgccatcccagcttacagacagcgaaggataaacaaacagtccgttaagcctggcgtggggatcgggcagcgtaccgttatcaacatagtcagcgatggcttcacggagcgcgttaaccgactgctcgtatagctcctccaggcgatccagcgcctgctcgggcgttaggtttgtgcctttattttccatattattctccttagcgttcacaggtgaggcacgtcattcgatagtatgacagcaaaggaggaaactaaaggggttagcgtaggggtggcgacagtaaacatgaaccctttaaaaagaaaagagaactatcttagcgccaccatcatcgctcaaaaagaagggtactggtacagccatttgttaagttcattacaattagtcatataaccatttcccggcttttgctgactcgatcagcatgctgatagtgaaatctgggacgggtacaggttccgttttcttgaacggatgccatgaaaaagggtgattaggaaaataggtttctattctgaagttacctcgctcgacattgagtttctcgaagaatttattcatgagatcttcggcttcaagttcatcaatgctcagatcagtatcaaggtcaatctctggtgttaattccacttgcttaatgttgaacagatatgtgccagcataaggccgtacaagctcgtaaacttgctgttcaatattgtctaccataacttatcattgccccgagcaatggtattgtagtcgcgtatagtgcgatatgttatttgtgacacatctgcggcaaggataatttccccgatcaaaggaatgaaacgtccaacaaacggcgcaatgttacgaaccataacacgtctggctgtccacggggtgtaaccgcctaaccatgtcggaagggatattccaaagggaaattttgactttttaaacactgcacgtgcagtcctggacgcgtatgatgtgcctttagtcgctccagcgggtttcgcccttgtccaaagattattacgacctgatgccaaagcaacaacagccccgaaatctgcaacaccaatcccaaactggcttgcggtattctcacagaaaatcataacagaagttcggcagcagtcagattggattttcctgcatagaagtatgttccatttagttcttctactgtatccattagaaactctatagttactattttggtttacttattgtacatccttgtttcgaatgaaagaaatcaatcttttgggaaagaacggatcaagatcacgggaaatatctgaaatcagatgaaagagacagtcgcgattcccaccaggggcatcacctggcaagcttgtgtgatcgctccgtttgaaccgaacacatctatatgtcagcatactgatacgggtttgatcttgcggatagcggtatcggttaatgccataggtgggggctccattttctcagcgaaccgcgaggccccgattaagcccctaaaaactatggatgtcaaaaaacccggcaaaccttctcaggtcaaccgggtaaagataatttattgttttttaaacgtctccggactcaccaggatgtcccgaaactaaaatctggctcctctgactggactcgaaccagtgacatacggattaacagtccgccgttctaccgactgaactacagaggaatcgtgtgaacggggcgaatattaacgaggtgcccctggcttgtcaaagcctgttttcacaaaaaaagttcgtttgctgctttattccacacttcggttaaaattcaccgtttcctgatgattttcacagcaaaaagcgcttactccctctttacgcgcgggtatctccacagccagcgcccgcttaccagacgccagtaaaacagcgcgccgcgcacggcccagtcaagaaacatccccagccaaacccctacaacccccatacccagcacaataccaagcgtataccctgccacaacgcgacagccccacatccccagcatcgatacccacatcgcaaatcgcacatcgcgcgcgcctttaaaacccgacggcaacacccacgcggccgcccaaattggcataaagacagcattaagccagagcagaactttcactacctcttttacgtcctgctcctgggtataaaatgaggcaaacagacccgcgaacggcgctgtcccccaggcgattgccgtaagtacgatagtcgacatccagaatacatggcgcaattgacgctctgcctgaccaatttgtccggtaccaagacgcttaccggtgataatagtcgacgccgaaccaagggcgttacccggcaggttgataagcgccgccacggaaaaggcaataaagttacccgcaataacgttagtgcccattccggcgacaaacatttgcgtcagtagcttgccaccgttgaacagcactgattcaatgctcgccggaataccgatacccatcacttcccagataatgccgaaattcagcggcttcagatagcttttcagcggaatgcgcagcgccggattaaaaccaatcatcagcacccaaataatcgctactgcgccgatgtagcgcgaaatggttaatcccagccccgcgccggcaaaacccagcccttgccaggagaaagccccgtaaatcaggatgctgctgatgataatattgagaatgttcatcccgccgttaatcatcaacgggattttcgtattccctgccccacgcagcgcgccgctaccgattagcgcaattgccgcagccggataactcagcactgtcagttcaaggtacgttaacgccagcccctttacttctgacgtcgcctcgcctgcgacaatattaataatttcactgccgaaataatgaatgaccactgccagcacaacggcaaatagcgtcataatcaccagcgactggcgcgccgccgcccttgcccgtcgcctgtcgcgcttgcccaggctaaaggcaaccaccaccgtagtaccaagatcgatagccgcaaaaaaagccataattaccatattaaaactgtcggcaagccccacgcccgccattgcttccttgcccagccaactgacgagaaaagtactgagcacgcccattagcaaaacacaggtattttccagaaaaatagggatagcaagtggggtgatttcacgccagaacaacactttgtagctcttgcgtttggcataccagggcgtacggacgacagcctggcgtaaggcagtggagacgttcaaaatggaccttaaagaagagagttgaaaccacatttcaataatgagcgagaaatcgtaaggctgcaaagctttttgcagaaaaaatgtctgcaaatgcaacaaagtgatgagataacccgcaatcgaatctgtaagaggttaaatggggtttgacaaaaatttttccgccgctaatatacgaccccacacgattcctctgtagttcagtcggtagaacggcggactgttaatccgtatgtcactggttcgagtccagtcagaggagccagattttagtttcgggacatcctggtgagtccggagacgtttaaaaaacaagaacttatctttacccggttgacctgataaggtttgccgggttttttgacgcccatagtttttggggacttaatcggagggctagcggttcgttgagaaaatgaagcccctgccatgacactcactactaatacagatactccagcccatgaaaaccagcaatgcgacaggatatttaaaggccaggcctgcccgcgctaatgttgaccggcattccggaacggcgctccagcacctcattaacccgcgaagtatcaacgtcatcccctttgataaacgtgcgcagcactggcgtaacgggcaatggaacttttttgtctgactcaaattcagcacggttgcgagaaagcggttcgtgtacctccagccaacgactgccatccggctctaccgaaaatttaacgggcctgtcgataatctgaacgcgggttcctacaggaacatggtcgaataaatatttaatatcgtcattgcgtaaacggatacagccctgactgacgcgaaggccaatgccaaagttagcgttagtgccatggatggcatataacctgccgatatatattgcgtatagccccatagggttatccggccccgcaggcaccatcgcgggcagcgtttttccctctttagcatattcccgacgcgtattagccgttggcacccaaaccgggccatcttgtttgcgttcaaccgcagttacccagttgcgcggcgtttcacggccagcctgaccaataccaataggtagcacctcaaccgtattcgtgcctgcgggataataataaaggcgcatctcggcgacgtttaccacaataccttcacgaacggtgtcaggcagaatcaactgctgcggcaccaccagtgtggaaccagactgaggtaaaaacacatccacgccgggattcgcttcaagcatattactcagcccctgaccgtagcgggcggcaaatgactctaagggctgagtattgttctgcggtacggcgattgtgacaggctgtcctaccagacgactgccttcgggcggcaacggatagcttatagccagcgagaaatggcttaccaacaagacgaaaaacggaaaaaaaggtgtgatacgacgcattatatcccttcctttgtcgcggcaggtgcgcgttaagtatagcttttttctcacatggctggtgttgtgcgcccgggttatgttgcgtttgcgttcccctccggcaggacaatattactggccgccaactcccccatgttgtggaacatggcgcacgcggcttccacgatcggcatcgccagcgccgcgccgcttccttcacctaaccgcatcgccatatgcaaatagggttccatagacaaatgcgcgagcgcgatgcgggcgcccttttccgccgaaaagtgcgacgggatcagataaggtctcaccgcaggcgcaatctgacaggccgccagcgctgccgagtaggaaagaaagccatccagcaatacgggtaagccacaccttgccgcgccaagcatcacgccggtcatcccgaccagatcaaaaccacccaccttcgacaacacatcaatgccgtcgcgcggattgggctgattaatcgcaatcgcccgccgcacgacgtccactttattatcgatgcgggaaggcggaagattcgcgccaatccccaccacctcttttgcatcacttcctgtaaaaacgctgaccatcgcggcggctggcgtagtgttcgccattcccagctcccctacgccaaataaggtcacgccgcgttgcgccaggtcgcaggtgtagcgggaaacctccagcaaaagcgcctcagcctgcaagcgactcatcgccgggccaacggcaatatttccgcagccgcgcgcgacgcgcatattaactacgccaggaataggttcggcatcaataccgacatcaatgacatgcaccttcgcaccggcctgagcggcaagcacgcatacgccggttgttccccgcgtcatattcgccgcctgaatcgccgtcacgattttgggcgaaaccgctacgccttcatcccagacgccatggtcggcgcacatcaccagcaccgccttttcacctacctgcggcgtaccgttaagacccggcatacccgcgagctgaacggctaaggtttccagtctgcccaggctgcccggcggtttgagcaggccgtcaatatgttgctgcgcacgcgccatcgcctcggcgtccggcgcaggaatgtcacggagtaaagcgtgtagtgtctgcataagatgtctcgtccgtaataatcggctcataacagagccagcagaaagatcaattcaccaagttcgatcgccgcgcccagcgtatcgccggtttgaccgccaagcgtacgtttaagcaactggccaaggatgaaaatcgccgcgcatgtgaccaccattgcggccaacccttgcataccaggcagtaataccgtggcgacgattaccgccaatcccagagtaatgcaggtttgccgtccgctgactttaccgataaatacattgccaagcccctcttcacgggcgtagcgatgacggtacatcaataaaacggcgctgccgcgtccggccgcacaggccgccgccaacgccgccaacattggcgttccacgtaacgccagttcgctgaccaccagaatttttgccagtagcacaaaaataagcgccagcccgccatgggttcccagacgactatcacgcataatctccagcattcgctcacggcggcgcgcggaaaaaataccatcgcaggtatcggccaacccatccaggtgaaaaccaccggtcagcaacgccagcgccagaatacagaacaacgccgctagcggaataccgcaccagggttgcaggaggatgaaaatcaggccgcttacccctcccagaatcaacccgataaagggaaacatcacgatcccacgcgaatactgctcgaaatccagtccctgcgaccagcgtgacggcacgggcaagcggctaataaaagcgagcatggcccaaaacagcttactcatttaattttgactccaatacctgagaccaccagccagacctcatccgccgctgccgacagtcgttggttgacccgaccggcaatatcacgaaaatggcgcgccagacggttttccgggacgatccccattcccacctcatttgtcaccagtaccactttcgccgggcagcgctggcaggctgcaattaaaatctgaatttcatcgtcaatggcgcgctccatcgccgcgtaatcccactgttcgggatcgttttcgcctcccagcgcaaacagcagattcgtcaccatggtggtaatacattccagcaaaatcgcgtcgtcaggggcaagatccgcggtaatcaacgtatcaagatgccgccagcattctgcggtccgccagtgtgccggcctgccatctttatgatgctgaattctcgccgccatctcgtcatcaagaatctgcgaggtggcgatatacagtacctgcggcgcatcgccaattaaggcttcagcatgacggcttttaccactacgcgccccgcccgtcaccagaatcatcataccggctcctgatgctgttgcatgatggtataaattttatcaatatcaatatgttgccgcatcgcttccgccagcagatcaaattgccgcgctttatgctccgcataacaaaaagtcgtttcccacggcgcaagcccttttcgtgcccgtaacccattgaccaccgcacgggtaaacgcatcgctgtcaaacaggccgtgaaggtaagtgccaaacgccagtccgtcggcggtgaccgcgccatccgccacagagcatccatttttctgtaacgtcatggccgtacagcatccttcctgcagcaccgtttcccccatgtggatttcataaccgcgtaccggtagccccgccgcggcagccagccagctgggcagctcgcctgacattgtcgcgttaacctgcgtcgtgattttatcctgtgcaaagcgagtgatcgtattaagcagccccaggcccggctgcgtacccagccccgactccacctcatccacaatagtgtcgcccagcatctggtagccaccgcaaattcccatcaccggcacgccctgccgatgtgtctgcaatagcgcatccgccatcccgctttcgcgcagccaggcgaggtcgctcagcgtattcttactgcccggcaggatcaccagatcagcgtcagtcaacgcttccgggcggcgaatatagcgtatgcgcacatccggctgcgccgccagagcgttaaaatccgtaaagttagaaatatgtggcagttgcacaatggcaatagtgatatcacggggggcgttaccgcgatatttatcgttttgcagcgcgacgccatcttcatcttccagatccacatccagccacggcatcactcccaggaccgggacgccggtaagcgattcgatttgttcgataccggaatagagtagcgccacgtcgccgcggaatttgttgataatgacgccctttactctgtcacgctcctgtttatgcagcagcgccagcgtgccataaatagcggcgaatacgccgcctcggtcgatatccgccaccagaataaccggacactgggccatttccgccattcccatattgacgatatcgcgatcgcgcagattgatttccgccgggcttccggcgccttccagcacaataacgtcatattcctgcgccaggctgttatagaccgcaaggatttgctcacgcaaacgcggtttatagtcatggtaactcaccgcatccatattggtcgccactttccccatcagcacgacctgcgcctggcgatcgctggtcggtttgagcagcaccgggttcatacgcacatctggcgtgatccccgcggcttccgcctgaaaaatctgcgcccgccccatctctttaccatccgacgtaataccagaattaagcgccatattttgcgatttaaacggcgcggtacgcagaccatcctgataaaaaatgcggcataaacccgccgccagcacacttttgccgacgtcggatgccgtcccctgcaacataactgcctgcgtcatgacgcctccctgaatgcgcacttttgcattcgatgaaaaaactccgtttctgttttacacagcggcagtcccagttgagtatgaagtttgaccagccagggctgggttagccccgcttgttccatcgcttccgtacacgcgaaaacctcgccaggcgcgccatgcgtcaggatctggccctggcgtaacacgtatacggcatcgctaatttcataaataagatcgatatcatggctggagataatgacatgattgccctgcgccacaatccgcctgatgatagcaagcatctgagtgcgccctgcgggatcgagaccagcagtgggttcatccagcaatagatagcgcgcctgtagcaccagcgctccggcgatagccacacgttttttttgcccatgactcaaacactgaatgggctgatggcgaaaatgttgggcgtcaaccagcgttagcgcctcgtcgacgcggcgcgtgatttccgcctccggcacccccaaattacgtaaactaaacgcaatgtcgctatcgatatcagtataaaaaatctgctgttcagggtcctgaaaaaccgtcgcaacttgctggcgcagcgccagtagtccgcgcttgctgtaatccagcggttttccctgccacaacacggcccctttttgcggacgcaacaggccgctcaggttcataaaaagcgtagacttcccacagccgttcgcgcccaccaaaccggtaacaggcgagagcgaaaaatccagatttaaccctttaagtaccggctcatcctgatatcggaaccacaggtctgaagtggcaagcataatagtccttacaggtgaaaatcaccctgatacagtttgatatccagcgtggtagtcatttgctgataacgcattaacacccgcgtaaacaggagtccagtcagcattgccagagatcgatagccgttcggcaggctgcaataaccaaaacgcagcgtttgcgagcgacgaattgccgccgcctcatccagaagaataaagagaaagcgccacgttaacaggatttgctcggtaagcaggcgtggaatatgcgcgcgcttaagcaagctaattaactgcggaaacggtaggttcatcaccagccacaacgtcgcggacagcgccgtcaggctacgccagaacgtttcattcgccgtaaccacgcccgcacgggtaatcccgatccagtacggcccaacagatatgccagccagcagcatttgcggctcgcggctgatgctgaagataatcgttatcacgccgaccaacaaaaatccaaaaggtatcgccatccatcgacaccagcgccagagggatatgcgcaatagccaacagctcaatccggcaatgatcagcagctcaatgccctgccctacaggcggcagaacaaacgccagtattatcatcgccagccacagcaaaaacttgcgctgcggcgcaacgtgtgcccagcggctttgatagctgagtcgatcaagcccggtcatcacggcgttgtttacctttgcaataccccaggatataaaaaatcaccgccgcgccaagagagccctgaagggtaaacagcaggctttcaatttcaccgctggcaggttcatataacggctgaaaccagggtttatactgcggcgcaatagcctgaatctggctttccgcttcgccgtctgaaccgccatattcaccgccatggttaataaaaaacggcagaatcaccaacgccaccaccatcgctaacaacatcaacgtttttttcattttaatgtccttgtacggtaatcacttgccgtttggttaactggtcataaatcatgacggttaataaaccttcagcaatagcgacaggaatctgtgtgaggcagaaaatccccataaacttcacaacagaccctgtcgctccggcatggggatctggaaacgcaacgccaagctggactgaagtcacaaaataggtcgccaaatccgccagcatcgcgcacagaaaaacggcgacatcgcggcgcagtccggcacggcaggccattttccacaccagataaccgacaaccgggccaatcaccgccatcgacattccatttgcgccaagcgtcgtcaggccgccatgcgccagcaatagcgcctgaaacaacagcacaaccgcgccgagaatcgccaccaccccaggcccgaacaagataaccgccagaccaacgccggtcggatgtgaacaactccccgttaccgacggaattttgagcgcggacaggacaaaaataaacgcgccgcacagcgccagcagtaccttctgatgattatcctcctgcacaatacgccgtaagcgtaccagcccataccacaagcagggtaaaaacagtaaccaccaggccagcgcccacactggcggtaaaaagccctccatgatatgcatcgcaaacgcctgttgcgggacaaccatcagcaatagcgctgcagccagtccactgaaagacaactgtctaagctgctgttcaagtttcattctgcatactcccactgtttattgaccagaatggtcgaaaaatagggcaacgctcgatcatcgttgacctcgtggaggtggcgccagcactgctcgccgagcagcgtggcctcggacatcattaaggcgcattccagcaggccagcctgcgccagcaacgctttaatacgggcgaatcggccatacactttcatcaacaccaggctatcatgctgttgtagcgcctgggctatttccgcctccggcgcggtacaagaaataaccgccagcgattgccgttctatggcgagcggcattttcgcgcgggcggctatcgcggcgaaggacgtgacgccggggacaatctccagccactccgggcagccgattctctggagtaaaaaaatccaggtactgaatagcatcgcatcgcccagggtaataaaaccgacctgtttacccgcttccacctctgtggtaagcgcggcggcaacctcgttccagaccgcttctttctcggcgccgtcagcgctcatagggaaatggcaacaacgtacttccgtctgctcgccgagatagtcgcgcacaatcgacagcgccaggctatcgccccccttacgaccggcgggcgcatacagaatgtccagcgagccaagaatccgcgctgcgcggacggttatcaggtcgggcgcgcctggcccggtacttaatgcgtataatttaccgttcatgccgcctcctctaccgtcatgttcagcgcctggcgcaaatgcgcgacaaacatcgcccggatagccgggttttctcccagcccgctcagccacggcgtcgccggaatgcccgccgcgttaaagcgcattttccatgagtcgccgtcgtctgaagccatatcattaatggcgtgatcgcccgccaccagcattaatggcatcaaatgtacgccggtgacgccttcgtcacgcaggctgtcgatcaggatgtcgacctccgggtagctttctacggcgccgacgcgcgccggaaagcgctgcgcggtcatcatatgatcgagacaggcataagctgcgaatgcgtgatggctggcgccgtggcccataaaaacgactttctccgtttgtctgagcgatggcatctgttgtcgcaacgcctgcattagctgcacataatcgttatggctgctcagcaacggcacgcccagcgtcaggcgagtgaataacggacgcaagagttgtacttcacggacaattttttcatattcgtcgccgttaataatgtgcaacgactgaatcgccacgtcctgatatccctgtgcggcaagcttttgcaaagcctgtaatggcgtatcgatgtcgataccgtcacgctggcgaagcttgcgaatgatcattccggaagtgaaggcgcgaaacaggtcgcgatcgggacaggacgccgccagatcacgttcgcacgccacaatgtttttttcacaggtgtcgtgatagctggtgccaaaactgaccaccagaagcgcttttttcatttttactccttagctgcggccagccagcgcgataaacgctgcgcaaaggcggcctggctttccagtaactcatcacccgtcacaagcggcgtcgggcgcgcaataacgatgcagggaatgcccgcatccagacagggctgaactttttcctgatatcccccctccgcgccggatgctttggtaatgactacgtcggcccggcactggtggtaaaacgcggcgttaaaatcagcgctgaacggcccacacagtgcgaaaatttctccaacgccgaaccccagttcgctgcagcgttgaatcacctccgccacgggcagtacgcgcgccagcaacgttttttccgccagcccggcacgccagacggccagatctttactgccggtcgtcagtaacacgcgcggaccaaaacgcctcgctatctcgcaggcatcggcaatactgcgcgccgtatagagaagcggatgcgtcagattgctaagctgctccggacgctgataacgacttaacaacacgcccgccgtttcacaggcgcgaaggaggttatggctgaccatttctgcataaggatgcgatgcatctattacccagcgagtacggttttcttttagccaggcgaccatctgcccgtactccagacgaccacagcgcacctgtcctttaatgtcgccagccagcgcttttccggctggcgtcgccacggataaggtgtacgcgacgttcgccgcatccagttgtcggcataacgcgcgcgcatcgctggtgccgcccaccaccagcacctccccctcattcacaacgtgtaacctcgcggcgttatcatcagcccatcctgaacataggtcgttttattaccaacgatgaccagactggtcatatctaccggttcaaaatccatatcgccgagcgtagtcagccatttttcctctttcttacgtccggcggatttcaccacgccaaccggcgtttgcgcgcttttactggcggcaagcaggtcaaacgcgcgcgccagatgcccttcgcgcccgcggctgcgcgggttgtaaaaacagataacaaagtctgcctctccggcggcaacaatacgtttttcaataaccggccacggggtcagcaggtcgctgaggctgatatgacagaagtcatgcatcaacggcgcgcccagtaaagaggcggcggcgatgctggcggtcatgccaggaatgagccgcacctcgacgtccagtttttgcttgccgaccagttccagcaccagacccgccatgccgtaaattcccgcatccccgctgctgatgagcgctacgttatgcccagcctgcgccagttcaatagccgcctggcagcgttcaatttccttacacatgccggtcttgatcacctgcttatcgccggtgaatgctttaaccagatgggtataggttttgtagcccacgacgatttccgccgcctgtaacgcctcaatcgcttccatggtcatcattgactgtgagccagggccaattccgattacgcttaacatcagtgtgaaactcccaaagtaatagtgacgccctgttctcgcagggtctcgcctaacaattgtccctggcttaataaccacgctgccgggccggatacgctgccaacgcccaccgtttttctgacgaagccagaaccgggaaaatggtgttcgaattcacgcaacgcttcggcggtaaaggttttaaaaggcacgcggcagcaggaggcgagctgaataagccccggctccccttttttgagcgtgacgctgccaatcgcttttaacgccagcggatcgagtttctgcgcttcaagctgacgcgccagtaatgtcgctaacaggggaaatggcgtatcgcggcgacagccaattcccgccaccacacgctggggcaccagtttccagtgcagtacgggaagctcagggaggtcattacgcaaagagacgcagataagcgcatccagctcaggcaaccgctgcaaatcatcaacagggataaaaccgcgaatatcgcactggccgatctcttccgttagttcggcatcccaccataaccccacacgttgatgactgaccaacatctggttaacggtttttaccgccgtgcgaagatcggacatgcgggcgttaagctggaaagctaaggtgtccaacgcggacatctcattgacatccgttgccgtggtaatcaccggatcggcgcctaacattcctgccaggtagcgcgtcaaggcattggccccgcccgcatgaccggaaagcaggctaatgacatgctgacctcgttcatcaatgacgaccaccgccggatcgctgaacttgtcgttcactaacggcgccaggacacgaacggcaatgccggtcgcgccgataaaaataagcgcggtataagtggtaaaagcctgccgggcggtattagcgaatccgccatcgaagggaataaatccctcttcccgcagtttttcactggtaaagcaggttaacggcagcatcgcggagagtctctttgccagcgccacgccgccgggcgtcaggcaaaacaacgcaatggattcaggctttacggtattcatggctaaagtccgctgcataaagtcttgagtagtgatactccttacccagaaaattcccgaccagaatcagcgccgtcttacggatgccagcatcacgtactttgtcgctaatatccgctaacgtgccgcgaacggtctggctttccggccaggtagccttatagatgaccgcgacaggcgtagctgccggataaccgccggcaatgagacgttccgccactcggtgaatacgctgaacggagagataaatcgccatcgacgtctggtgactggcgaacgcctccagttgctcgcgcgccggtactggcgtacgcccttccagacgggtaataatgagactctgcgatacctccggtacggtatattccacacccagctccgccgcagcgccgagaaacgcgctgacgccaggcactacctgccagtcgataccacggcgggttaactcttcgccttgctcacgtacggagccgtacagcgagacatcgcccgtttgcaaacgcaccaccgtttttcccgctttcacgcccgccgccatcagctcgataatctgctcaagatgcagttcggcgctgtcgtagcgttctgcctgcgcggggcagtaatccagcagttcggtattgatcagcgaaccggcatagataactacctgcgcctgttgcagcaggcggtagcctttaagcgtgatcagctcgcgatcgcccggcccggcgccgacgaaccatacacagcgtggatcaaatgtctctgacatggttttcttccttctgacaggcgataacaaaaacaggattgttcggtttgaaatagtgccccgcccccagcggcgttaacgatgaaagctgaagctgtacacagtccattcgacatgcgccgatgtgcgcaagatgcgccagcgcgctatgaaggttttcctgcaagataaaggtcatcaccagacggccaccgggatgcagatggcccatcgcccagtcaatcagcgccgtcagatgtccgccgctgccgcccataaacaccgcatcggctttcccggttatggtcattggcgcttcgccggggagaatatcgatattgccgcaggcaaagcgctgacgattctcatcaagcagccgtagcgcggcaggattacgctcgatagccgtcacctgcaacgaaggaaattgcagcgccgcttcaattgagacgcttcccgttcccgccccgacgtcaatcaggtgactggcgcggtggagctcaagtttcgacagcgccagcgcccgtaccgcctctttggtcattggcacgttctcgccgcgcagaaaaagctcatctttcatccaggatcaccactgtattcatttcatagtcggcgttgaccgcactgacgggtagccagtggatccgctcattttccatcgccagattttcaccaatcaccattaagcgatgccctttgccccgcgcgaccagttcccgcgcgatttctcgcggcccgcagcgggcatccgtgaccatcgccactttgcgatggctcgccaactgatcgaagctgacgcaacgaccgtggctactggtcaaccacatgtcattcatatcaattccagcctgcgcgcacagatactgtacggcgctgatgccagggataatgcgaacctgttcgataccaaaatgcgccaccaggcgtgtaccgatgccataaaacagcggatcgccggaggccagcaccacgatccctttatcccagcgggcggcaatccaggacaacaacgcgccaatatccgcgcccagcgtaaatcgttcgccgccaaacgccggaaactgcgccaaatgccgtttaccgcctgccagcgcatcggcgtggtctatcgcttccagcgccgcaggggtcatcaaatgccgtccggcgggccccattcccacgaccgttagcattgcagctccttagcaatctcgtcgacgggacgattactgccgagaatatggttatcaaaagaaaacaggatggcgtcgcagacaggcggcgttttggtaaaacgcagcatctgcatgactcgcaaacaaatacgcctggcaagatggttatagatatgcccgaagccatatgcttcaatgtgctccattgccgcttcagtggtatcgcaatcgccgaccagggtgagtaactccagcggcgcgcccagtaaagctaaatgcgcgaccagcgtttccatgcgcgcatcggcaatatggctatgggtatgaaagatcccggcggcgattttgatcagttttccaggatgccccaccagcactatctggcaaaatcccagccgtaccgcctcttcaatcatgtagccgacaaaattgctcatggtgacgactgcctgtgtgtcgacgcccatttgttcgcgaacaaaccgttcgccgtggttgcccggcacgagtatcacccgcgttaatcctgacgcccgtttgatctccagttccagcgatagtgagcgtttccagctttcttccgacatcggcgtcacaatgccggtagtgccaataatggaaatgccgccaaggatgccaagccgcgagttatacgttttttgcgcccgcacttcgccttccggggcaaaaatctccacatcggccccacgcgccgggcctatcgcttcgcgcaccgctgactcaatggtatggcgcggcgtacgattgatggcggcgctcccgagcggcagtccaatccctttacgcgttaccgtaccaataccttcgccgccagtgagcgtaatctcaccgctgtcgttgagcgtaacgcgggcaaaaatcagcattccgtgcgtggcatccacgtcatcgccgccatctttacgaattgcggctatcgcctgctggccttcaatgtgcggcgactccacgttcaggcatagcgtgacgcccgacggcgtgacgatggagacctgatgaatcagatgttgacgtaataccatcagcgcggcgacttttgccgccgccgtcgcgcaggaaccggtggtatatcctttacgtaacgctttaccgtggtgccagaccggcgcgtcaaaagaaagctcgctcatcaggcctcccggagatgatagagcagcgcattgacgatagcggcagccacgttactgccgcctttacgccctaacgcggcaaccgcggggaaatggctatgggtgagtgcctctttggactccgccgcgccgacaaagcctaccggtacgcccaccacgccgctcaccgtcacgttatgttcaagcaaacggaacagggccgtcggcgcattaccgaaaacaaagagcttgtttttctcctcctcggcgatagcgatatcgacggcggccattgaacgggtaatcccctgcgtttgtgcggcgcgcaccacgcgcggatcgctgatataacagcgacactcgccgccaaacgtcgccagtaatcttttattaatgccggacagcgccatcgtggtatcggtataaataatgcacggatggcgtaacgcatcacaaagctgctccagcgcatcggcagagaaccacaaaatgtccagccagtcgaaatcggcggtggtatgaataacccgcttgataatggcctcatggagcggactggcgaaacggtaatcaggacgcgtttcgcgaataatgtcgctaataatggtgaaactgttggcctcaatggtttggggctgctggatataatgcatactgtcgtcctcaggccacgccagataacccgcaccgcgccgcaataaacagcgccagcgccagggttgaagcgacccacatcaatcgaatcgttcgggaaatatcgtccacggaaatatcgcgctgcgcgtcgcctatccagggcttgtccacacgctcgccaaagtagttatttgggccgccgagctggatacctaaggcgccggccacacacgcttccgaccaggcgcaatttgggctactgtggttataacggtcacgccagccaatacgcagcgcacgccaaccactcaggcgacacagtcctgccgcaatgcccagcaacagccagctcagtcgggcaggaagatagttcgctacgtcgtccatacgggcgctgaccataccaatcgcccggtatttttcatgtttgtagcccaccattgaatccagggtattgacggctttgtaggccatcgccagcggcgcgccgccgagaaagaggaaaaagagcggcgcgataatgccgtcaacggtgttttctgcaaccgtttccaccacgccgcgattgatctgcgctggctgaagttgcgacgtatcgcgcccgacgatccaggagagttttattcggctttccgcaaggtcgttctcccgcaacggtcgttcaacctcctgcgcggcgcgggccagagagcgtccggccagcgtggtaaagatcatccagacttcgacgctccagccaaaccaggggtgaatccgctgcgccagcgccagtacgccccatgccacgccccaggtcgccccgacaaccacaacccacattacgccgccgccaatccgcagcgctttatcgccgggacaatagcgacgcacaatacgctgcacaaacgtaattaatcggcctatccagcgtaccggatggggccagtgttgagggtcgccgatgataaaatccagcacccaggcgatacaccaggcaaggatcgtcataatacgcgcctcgccgccgccagccagtgctgcaacatttccggacgctgggcgaaatggacgtgcagatagctggcaaacgtgttgcctgtctgccagccgccagtccattcctgtaacacgcggccatcgcgaaccttacgacaggccataacggcgggtgtttcggggataaaatctgagtagtgaaattcatggccgcgcactatctcgccaggcgccgccaatagcgttggctgcatagcctgcgcctcacagtagccaaagcgggtaagtcgcttacccattttgctgtgaccggggataatattcgccatctgatgaatttccccaccgctatcctccagagtgctccccagatacatcagaccgccacactccgcgtaaatcgccacgccgcgctgatgcgccgcccgcaaatgttttaacatcgccgtatttgccgccagatccgcggcgtataattcaggatatccaccgcccagccagatcatctgacaatcaggcaatgcgcggtcatgcagtgggctaaaacgcacaatgttaacgccggcacgctccagaaaatcgatgttatcgggataataaaagttaaaggcctcatcatccgccagagcaagcgtcagccctgcccccgctgtgttatcggggcgctcaggccacattcccgtcggaagcgctgataacacgctcagcgagagtagcgcatccacatccactgtttgttccagcgaggcggcaaaatcatgccatgattgctgattgacgagggattctctggcggtaatcaaccccaggtggcgttcaggtaatgcgacgccgtcgcaaggaggaacataccccagtaccggcagtgagcaataatgttcaatggcatttttgaggagctgatagtgggcgtcgctagtgacgcgattcacaatcacgcccgcgaggttgagggtcgggtcgaagtgctgaaatcccataacggtagccgcaagcgacgttgaaacagccttgccgtccaccagtaggatgaccgggcaaccaagctgtttggccatcgcggctgtgctgcagtaattggggtcgacgccatagccgtcatacagccccatgacgccttcaatgacagcgatatccgcctgccgcatttgttcgcaaaataaggcgttgagaacaggaggaggaagcatgaaactgtcaagattacgggacgccacgccacagatagcggtatgccagccggtatcaaggtaatctggcccaactttaaacggctgtacgcgcagcgcgcgtttttgcagcagcctcaacaaaccaagcgtcaccgtggttttgccgcaaccgcttcctgtgcctgcaagaataaatgcgtgatgccttgccgccattaccctgatcctgttcagggtggtaggggtatacaggtacgcgcatgttcagtctttcgactgtacgcgtcttcgcaacccacttcccaccgaagttgttggttatcaccgacaggcaggtcttctggcttagcgtcctcctcgcccgtccttcccaatcttgcgatcagtggtctttacggggtcgtcagcatcacagcagcgggggctgcgggggattttcacccccttccctaccacaaatgtggcaaacctgttggtttacgttatggctgtacggcacacccataacggcaattaataatgtgctacgttttacatttctgtgagcaatagcctgagcggttgctcatctgacgttaatctactcatccttaccggtatattgacgataaaacgtatcgacaaagcgtaataaaacttatctttcctgacactgtacttcatcacaaaaataaaaactgatgcagtttatgccctaaattttattattttgttgcgctatgacaatttattgttacaccagataaattttctttctgaaatgattaagatacaaaagactatcaaaaatcggcaatagcaaaatattgctattcataacgatggaggatgagaattctcatttatctgctggcgataagcctgcggcgtaacctgataggtctggcggaagactttgcaaaaatagctggtttgcgaaaagcctaaattacgcgcaatactggcaatactccagtcactatggcaaagcaattctctggcgctaaccattctctggcggtttacccacgcattaaatccgattccctgatattttttgaatagcttactgaagtaataggggctgagatagacatgtgaggcgacatcctcaagacgaagatcgtcggacaaatgcgcatcaatatagcgaagcgcttttttcattttactgtcatgcggagtgggaccacgagtggttttatttgcctccgattgctgcggattgtctttgataaccacgaaattgagctgttttttcaggcaattctcaactatcagtttaagaagatcggcggaagcgataacgcgtgaatagtccatctctggcacattccgaaattcattcaagagctcaggatcagcctgccagcgatcgtcgacattaagaatgtttaccagctccacgtcattacttaaacgaacctgcccgcataaaacaaagccaactaaatgccctgcgattaccagcggaatagaaaaatccgttagaccggcatgacaacgataaatacagggttgatcggacttcgatgcctccagtcccccgcagcgatcgctcatacgacaacgtgtactatgctggggatgctgccgcatcaactgacaaaacggcgtgaaattgaatagctcagatatttcatcaccatgaatattgacaaccacaaccgccagaccggtggcttgtgcaaaatcctgtgcgattttattaatgagttctgagttcagagcgctcgcagaaatcatgataaaacccctcagttaatttattgttataaacaaaacacattatttacattcactttttattagcattatcctggccctgataaaaagtacaatgacaatatcaaaagtctcccattgctgggagacttttgatcagttcgtgaaagcagatcacgaaattatctcacctgtttttacgatacatcattgctgtgaatctggttcgcattttcttacagttcacagcggttacaaggtaaattcttaccaataaaatagcgatatatggctgctccggcacaggcgccgataacaggcgcgacaatcggcacgataaaataagggatctctcgcccaccgctcatcgccatgttcccccaccccgctaaccatgtgaacagtttgggaccgaaatcacgcgccgggttcattgcaaaaccggtaaggggtccagtagacgcgccgataacggcaaccaatatcccaataagcaaaggcgcaagcggccctttaggaatgccattgccatcatccgtcaatgccatgatcatgcccatcagaatcgacgtaatgaccacttccaccaacgcagcctgccatacatttagcgctgcggccggataggtactgaaaatgctggctaattgcaaactttcgacgctaccgcgcaccatatgatgcgcagtctcaaattcagtaaaaaggctactataaagcacatacgccagcagagcgccgccaaaagcgccggcaaactgggcaataatataaggcaatactttctgtttgggaaagcaggcaaacagccacagcgcaatcgtcaccgcagggttaagatgtccgccggagattccggcagtaaggtaaacggccagtgaaattccaagcccccaaataatgcaaatctcccataatccgaggctggcgcctgcgactttgagcgcgctcaaacaaccgataccaaaaaacaaaaagagtccggtgcctaaaaattccgcaccacattgcgcctttagagaatcattcatgtgacaccttctgagcaaagttcgtgtcctggccagcgcaagtttcggctggcggtagagtacagctaacctcactataaaaagtgccgcctgtaaattgttggcaacctgcgggcctgccttccggaaaaatcgtgttgcgatagcaaaattttgcttttccgatatttttatcagcccatcacacgggaaatttgagctataaaatacgcctgttgaaataataaaatattgcacaagccaacttatcaatttcgaataaacatcacattttgcgtctttcgccatatcaaataaaaatactctcgtcactaacaaaaatgtaaaaatgaaataataaaaacaaaataatcatatagacaataataaattaaatattgattatcaatgagttataaaaataaaaggcaatttagtcatattgctttctcattattttctgatgctcaacagcaagtcagccattctttttcctcgcatcttcttatagtcccaactatcggaacactccatgcgaggtctttatgcaacaagaagcactaggaatggtagaaaccaaaggcttaaccgcagccatagaggccgctgatgcaatggttaagtcagccaatgtgatgttagtgggctatgaaaagattggctccgggctggtaaccgtcatcgtgcgcggcgatgttggcgcggtcaaagcggccaccgatgcaggtgccgcagccgcacgcaacgtgggtgaagtgaaagccgtacacgtcatcccacgccctcacaccgatgtagaaaaaatcttaccgaagggaattagccaatgagcagcaatgagctggtggaacagatcatggcgcaggtgattgcccgtgtggcaacgccggaacaacaggccatccctggtcaaccccaacctatacgagagacggctatggcagaaaaaagctgcagtttaacggaatttgtcgggaccgccattggcgataccctgggcctggttatcgccaacgtcgataccgccctgctggacgcgatgaagcttgagaagcgctatcgttccatcggtattctcggcgcccgcaccggcgcaggcccgcacattatggcggcggacgaagcggtgaaagccaccaacaccgaagtggtcagcattgagctgccgcgcgataccaaaggcggagcgggccacggttcgctgattattttaggcggtaacgatgtatccgacgtcaagcgcggtatcgaagtcgcgctgaaagagctggaccgcaccttcggtgatgtttacggcaacgaagccggacatatcgagctgcagtacaccgctcgcgccagctatgcgctggaaaaagcgttcggcgcgccgattggccgcgcctgcggcattatcgtcggcgctccggcttccgtcggcgtactgatggccgataccgcgctgaagtcagccaacgttgaagtcgtggcgtacagctctccggcgcacggcaccagctttagtaacgaagctattctggtgatttccggcgactccggcgcggtccgtcaggcggtgacctccgcccgcgaaatcggcaaaaccgtccttgcgaccctcggttctgaaccgaaaaacgatcgcccgtcctacatctgatacccacgaggctgattcatgagatcgaaaagatttgaagcactggcgaaacgccctgtgaatcaggacggctttgttaaggagtggatcgaagaaggctttatcgcgatggaaagcccgaacgacccaaaaccgtcgataaaaatcgttaacggcgcggtaaccgagctggacggaaaaccggttagcgaattcgacctgatcgaccactttatcgcccgctacggcatcaacctgaaccgcgccgaagaagtgatggcgatggattcggtcaagctggctaacatgctgtgcgatccgaacgtcaagcgcagcgaaatcgttccgctaaccaccgcgatgaccccagcgaaaattgtcgaagtggtttcgcatatgaacgtggttgagatgatgatggcgatgcagaaaatgcgcgcccgccgtactccatctcaacaggcgcacgtcaccaacgttaaagacaacccggtgcaaattgccgccgatgccgccgaaggcgcatggcgcgggtttgacgaacaagagacgacggttgcggtagcgcgctatgcgccgttcaacgccatcgcgctgctggttggttctcaggtaggtcgtccgggggtactgactcaatgctcgctggaagaagccaccgagctgaagctcggcatgctgggccacacctgctacgccgaaaccatctccgtttacggcaccgagccggtcttcaccgacggtgacgataccccatggtcgaagggcttcttagcctcttcctacgcctctcgcggcctgaaaatgcgcttcacctccggctccggctccgaagtgcagatgggctacgccgaaggcaaatccatgctgtatctggaagcgcgctgcatctatatcaccaaagccgcgggcgttcaggggctgcaaaacggctccgtaagctgcatcggcgtaccgtctgccgtgccgtcaggcattcgtgccgtgctggcggaaaacctgatctgctcttcgctggatctggaatgcgcctccagtaacgaccagaccttcacccactccgatatgcgtcgtaccgcgcgcctgctgatgcagttcctgccgggtaccgactttatctcctctggttattccgcggtgccgaactacgacaacatgttcgccggttccaacgaagatgcggaagactttgacgactacaacgttatccagcgtgacctgaaagtggacggtggtctgcgcccggttcgcgaagaggacgttatcgccatccgtaacaaagccgcccgcgcgctgcaggccgtgtttgccggaatgggactgccgccgattaccgatgaagaagttgaagctgcgacctatgcccacggttcgaaagatatgccggagcgtaacatcgtcgaagacatcaagttcgcccaagaaatcatcaataaaaaccgcaacggtctggaagtcgttaaagcgctggcgcagggcgggtttaccgacgtggcccaggacatgctcaacatccagaaagccaagctaaccggcgactatttgcacacctccgccattatcgtcggcgacggacaagtgctctctgcggttaatgacgtcaatgactatgccggtccggcaacaggttatcgcctgcagggagaacgctgggaagagattaaaaacatccctggcgctcttgatcccaacgagattgattaaggggtgagaaatggaaattaatgaaaaattgctgcgccagataattgaagacgtgcttcgcgatatgaagggcagcgataaacccgtctcgtttaatgcgcctgcggtatccacagcaccacagaccgctgcgcctgcgggcgacggctttctgaccgaagtgggcgaagcgcgccagggcactcagcaggacgaagtcattatcgccgtcggcccggcatttggcctggcgcaaaccgtcaatatcgtcggcttaccgcataagagcattttgcgcgaagtcattgccggtattgaagaagaaggtatcagggcgcgcgtgattcgctgctttaaatcttccgacgtggcgttcgtcgccgtggaaggtaaccgcctgagcggctccggcatctccatcggcatccagtcgaaaggcactacggttatccaccagcaggggctaccgccgctctccaacctggagctgttcccacaggcgccgctgctgacgctggaaacctaccgtcagattggtaaaaacgccgcccgttatgcgaaacgcgaatcaccacagccggtccctacgctcaatgaccagatggcacgcccgaagtaccaggcaaagtcggccattttgcacattaaagagaccaagtacgtcgtgacgggcaaaaacccgcaggaactgcgcgtggcgctttgataaaggataactccatgaataccgacgcaattgaatcgatggttcgggacgtattgagccgcatgaacagcctgcagggcgatgcgccagcagcggctcctgcggcaggcggcacgtcccgcagcgcaaaggtcagcgactacccgctggcgaacaaacacccggaatgggtgaaaaccgccaccaataaaacgctggacgactttacgctggaaaacgtgctgagcaataaagtcaccgctcaggatatgcgcattaccccggaaaccctgcgcttacaggcgtctatcgccaaagatgcgggccgcgaccggctggcgatgaacttcgaacgcgccgccgaactgaccgcggtaccggacgatcgcattcttgaaatctacaacgcccttcgtccgtatcgttcaacgaaagaagagctgctcgctatcgccgacgatctcgaaaaccgttatcaggcaaagatttgcgcagctttcgttcgtgaagcggcagggctgtacgttgagcgtaaaaaactcaaaggcgacgattaaggatttcgtatgcgatatatagctggcattgacatcggtaactcatcaacggaagtcgcactggcgcggcaagatgagactggcgcactgacgattacgcacagcgcgctggcggaaaccaccgggatcaaaggcacgttgcgtaacgtgttcggcattcaggaagcgctcgccctcgtcgcaaagcgcgcggggatcaatgtcagcgatatttcgctcatccgcattaacgaagccacgccggtgattggcgatgtggcgatggaaaccattaccgaaaccatcatcaccgaatcgacaatgatcggccataacccaaaaacgccgggcggagcaggccttggtgtgggtatcacgattacgccggaggagctgttaacccgccctgcggactcgtcctatattctggtggtatcgtcagcattcgattttgccgacatcgccaatgttatcaacgcctcaatgcgcgccggataccagattaccggcgtcattttgcagcgcgacgatggcgtgctggtcagcaaccggctggaaaaatcgctgccgatcgttgacgaagtgctctacatcgaccgcattccgctggggatgctggcggcgattgaagtcgccgtgccggggaaggttatcgagaccctctccaacccttacggcatcgccaccgtattcaacctcaacgccgatgagacgaaaaacatcgtcccgatggcgcgcgcgctgattggcaaccgttccgccgtggtggttaaaacgccatccggcgacgtcaaagcgcgcgcaatacccgccggtaacctggagctgcaggctcagggtcgtaccgtgcgcgtggatgttgccgccggtgccgaagctatcatgaaagcggtggacggctgcggcaagctcgacaacgtcaccggcgaggccgggaccaatatcggcggcatgctggagcacgtacgccagaccatggccgagctaaccaataagcccagcagcgagattttcattcaggatcttctggccgttgacacctcggttccggtgagcgtcaccggcggtctggccggggagttctcactggagcaggccgtcggcatcgcctcgatggtgaaatcagaccgtctgcagatggcgatgattgcccgtgaaattgagcagaagcttaatatcgacgtgcagatcggcggcgctgaggctgaagccgccattctgggcgcgctgaccacgccgggtaccacccgaccgctggcgatccttgacctcggcgcgggctccaccgatgcctccatcatcaaccctaaaggcgaaatcatcgccactcacctcgccggtgcaggcgacatggtgacgatgattattgcccgcgagctggggctggaagaccgctatctggcggaagagatcaaaaaatacccgctggcgaaggtcgaaagcctgttccacttacgccacgaggacggcagcgtccagttcttcccgacgccgctgcctcccgccgtgttcgcccgcgtctgcgtggtgaaaccggacgaactggtgccgcttcccggcgacttagcgctggaaaaagtgcgcgccattcgccgcagcgctaaagaacgcgtctttgtcaccaacgccctgcgcgcgctgcgccaggtcagtccaaccggcaacattcgcgatattccgttcgtggtgctggtcggcggctcgtcgctggatttcgaagttccgcagctggtcaccgatgcgctggcgcactaccgcctggtcgccgggcgaggaaatattcgcggcagcgaaggcccaagaaacgcggtggccaccggcctgattctctcctggcacaaggagtttgcacatggacagtaatcacagcgccccggccatcgtcattaccgttatcaacgactgcgccagcctctggcacgaagtgctgctgggtatcgaagaggaaggcatccctttcctgcttcagcatcacccggctggagatgtcgttgacagcgcctggcaggcggcgcgcagctcgccgctgctggtcggcattgcctgcgatcgacatacgctggtcgtacattacaagaatttacccgtatcggcgccgctttttacgctgatgcatcatcaggacagtcaggcccaacgcaacaccggtaataacgcggcacggctggtcaaagggatcccctttcgggatctccatgcttaatcacaggagaacggcagtatgaataacgcactgggactggttgaaacaaaagggctggtcggcgccattgaagccgccgatgcaatggttaaatccgccaacgtacagctggtgggctacgaaaaaattggttctggcctggttaccgtcatggttcgcggcgatgtcggcgcggttaaagcagccgtagatgccggcagcgcggcggcaagcgtcgtgggtgaagtgaaatcctgccacgttatcccgcgtccgcacagtgatgttgaggccattttaccgaaatcagcctaatcgatggcgaataaggagcaccgcgtgaagcaatcactgggattacttgaagtttgtggtctggcactggctatcagctgcgccgatatcatggcgaaatccgcttctatcacgctgctcgccctcgaaaagaccaatggttcaggctggatggtgattaaaattaccggtgatgtggcctccgtgcaggcggccatcaccaccggtgcgcaatttgccgaacagcggaatggtctggtggcccacaaggttatcgccaggcccggagaagggatcctgctcgcagagacaccctccccctccgtcattgaacctgagcctgaagcgtcagagatagctgatgtcgtttctgaagcgccagccgaagaggccccgcaggaatcagaactggtcagctgcaatctgtgtctggatccaaaatgtccgcgccagaagggcgaacctcgtacgctttgcattcattccggcaagcgaggtgaagcgtaatggataaagagcttttgcaatcaacggtccgtaaagttctcgacgagatgcgccagcggcctattccgctgggcgtctcaaaccgtcatatccacctgtccgcgcaggattatgagcggctgtttcccggccatcccatcagcgaaaaaaaagcgctactgcagccgggacaatatgctgcggagcaaaccgtcaccctggtagggccgaaaggacagctcaacaatgtgcgcctgctcggcccgctgcgctcggtaagccaggtggaaatttcgcgtaccgatgcgagaacgctggggattgccgcgccgctgagaatgtccggcaacctgaagggcacacctggcatccgcctggtcagcccctttggcgaactggagctaccttccggggttatcgtcgcgcagcggcatattcatatgtcgccgcttgatgcgctgatcctgaaggtctcccacggcgatagggtttcggtagcgattgaaggcgacgagcgcgggctgattttcaacaatgtggcgattcgcgtttcaccggacatgcgcctcgaaatgcacattgataccgatgaagccaacgccgctggtgccgataacccgcaggcctttgcccggctggtaggcccgcgatgaacggcgaaactctgcagcgcattgtcgaggagattgtctcccgactgcagcgccgtgcccagagcacggtgacgctgagcgttgcgcagcttcgcgatgccgactgcccagcgctgttctgtcagcacgcgtcgctgcgcatcctgctcgtcgacctgccgctgctgggtcagcttgcggatgcagaaaccgacgataccgccgcccggaaaattcacgacgcgctggcgtttggcatccgcgtacagctcagcctgcacagccagctgctgccggttatcccggtaaaaaaactggctcgtctgccgctggtattcaccgatgagcgcggactgccgctggttctgcacgcgggttcggtgctgagctatcgcgatgtcgcgctgctaagccgggggcgtgtggttgtccaccgcaaatgcatcgtgacggccctggcgcgcgaagcagctaatgcgcggaatattcaattaattaagcaggagtaaatcatgcatctggcacgagtcacgggcgcggttgtctccacgcaaaaatcaccttctttgattgggaaaaagctgctgctggtgcgtcgggtcagcgccgatggcgaactccccgcctcgccaacctccggcgatgaagtggccgtggattccgtcggcgcaggcatcggcgagctggttctgctcagcggcggctccagcgccaggcacgttttttccgggccaaatgaggccatcgacctcgccgttgtcggcattgtcgatacgctttcacgttaaggggcgaatatggcgatttatacccgaacaggtgacgcaggcaccacatcactgtttaccggccagcgggtgagcaaaacgcacccgcgggttgaagcctacggcacgctggatgagctgaatgccgcgctgagcctgtgcgcctgcgccgctgcggatgaaaatcaccgcaccttactcgaggccatccagcagcaacttttttggtttagcgcagagctggccagcgacagcgagcagccatcgcccaaacagcgctacatcagcagcgaagagatttcggccctggaagccgctatcgatcgggcaatggcccgcgtcgaaccgctgcacagctttattttacccggacgctgcgaagccgcgagccgcttacattttgcccgcacgctggcgcgccgcgccgaacgccgtctggttgaactggcaactgaagtcaacgtacgccaggtgctgatgcgctacatcaaccgcttatcggactgcctgtacgccctggcccgcgcggaagatagcgatgcgcaccaggccaacatcatccgcgaagttagcaagcgctatctggctgccagccagccgacccgcagcaaggagacaacgcccgtggccctctcattccacgatctgcaccagctcacccgcgccgccgttgaacgcgcgcagcaactgcaggttccggtagtcgtcagcatcgttgacgcgcacggcacggaaactgtgacctggcggatgccggacgccctgctggtcagcagcgaactggcgccgaaaaaggcctggaccgcagtggcaatgaaaacggcgacccatgagctgagcgatgttgttcagccaggcgccgcgctttatggcctggaaagtcatttacagggaaaagtggtcacctttggcggcggttacgccctatggcgcgacggcatattaattgggggtcttggcatcagcggcggcagcgttgagcaggacatggacatagcacagaccgccatcgcggctattaacgtgggaacacatcaatgaatacttctgaactcgaaaccctgattcgcaccattcttagcgagcaattaaccacgccggcgcaaacgccggtccagcctcagggcaaagggattttccagtccgtgagcgaggccatcgacgccgcgcaccaggcgttcttacgttatcagcagtgcccgctaaaaacccgcagcgccattatcagcgcgatgcgtcaggagctgacgccgctgctggcgaccctggcggaagagagcgccaatgaaacggggatgggcaacaaagaagataaattcctcaaaaacaaggctgcgctggacaacacgccgggcgtagaagacctcaccaccaccgcgctgaccggcgacggcggcatggtgctgtttgaatactcaccgtttggcgttatcggttcggtcgcaccgagcaccaacccgacggaaaccatcatcaacaacagcatcagcatgttggcggcgggcaacagcgtctactttagcccgcatccgggggcgaaaaaggtctctctgaagctcatcagcctgattgaagagattgccttccgctgctgcggcatccgcaatctggtggtgactgtagctgaacccaccttcgaagcgacccagcagatgatggcccacccgcgaatcgcagtactggccattaccggcggccccggcattgtggcaatgggcatgaagagcggtaagaaggtgattggcgctggcgcgggtaacccgccctgcatcgttgatgaaacggcggacctggtgaaagcggcggaagatatcatcaacggcgcgtcattcgattacaacctgccctgcattgccgagaagagcctgatcgtagtggagagtgtcgccgaacgtctggtgcagcaaatgcaaaccttcggcgcgctgctgctaagcccgaccgataccgacaaactccgcgccgtctgcctgcctgaaggccaggcgaataaaaaactggtcggcaagagcccatcggccatgctggaagccgccgggatcgctgtcccggcaaaagcgccgcgtctgctgattgccgttgtcaacgccgacgatccgtgggtcaccagcgaacagctgatgccgatgctgccggtggtaaaagtcagcgatttcgatagcgcactggcgctggccctgaaggttgaagaggggctgcatcataccgccattatgcactcgcagaacgtgtcacgcctgaacctcgcggcccgcaccctgcaaacctcgatattcgtcaaaaacggcccctcttatgccgggatcggcgtcggcggcgaaggctttaccaccttcactatcgccacgccaaccggtgaagggaccacgtcagcgcgtacttttgcccgttcccggcgctgcgtactgaccaacggcttttctattcgctaactgaggtcgcgatgaataccttctcactacaaacgcggttgtacagcggtcagggcagcctggcggtgctcaagcgctttaccaataagcacatctggataatctgcgatggctttctggcgcgctctccgctgctggataccctgcgtaatgcgctgcccgcagataaccgcatcagcgtctttagcgagataacgccggaccccaccatccacacagtggttcagggcattgcgcaaatgcaggctctgcaaccgcaggtggtgatcggttttggcggcggctcggcaatggacgcggcgaaagcgattgtctggtttagccagcagagcgggatcaacatcgaaacctgcgtggcgatcccgaccaccagcggcaccggctcggaagtgaccagcgcctgcgtaattagcgacccggataaaggcatcaagtatccgctgttcaacaatgcgctgtatccggatatggcgatcctcgacccggagctggtggtcagcgtaccgccgcagattaccgccaacaccggcatggacgtgctgacccacgccctggaggcctgggtgtcaccgcgcgccagcgactttaccgacgcgctagcggaaaaagccgccaaactggtgttccagtatctgcccacggcggtggaaaaaggcgactgcgtggcgacgcgcgggaaaatgcacaatgcctcaacgctcgccgggatggccttcagccaggcggggctggggcttaaccacgcgatagcccaccagcttggcgggcagtttcatctgccgcatggcctggccaacgccctgctgttaaccacggttatccgttttaacgccggcgttccgcgcgccgccaaacgctacgcgcggctggccaaagcctgcggtttttgcccggcagaagccaatgatatcgcggcgatcaatgcgctgattcagcaaatcgaactgcttaagcaacgctgcgcccttccctcactggccgttgcgcttaaagaaggaagatccaacttttccgcacgcattccggcgatggtgcaggccgcgctggcggacgttacgctgcgcaccaacccgcgcccggccagcgccgaagaaattcgtgaactgctggaggaactgctatgagcaccgccatcaacagcgttgaaatgtcccttagcgccgatgaaattcgtgagcgcgtccgcgcagcgggcgttgtcggcgcaggcggcgcaggttttcccgctcacgtcaaactacaggcgcaggtagagatttttctggtgaacgccgccgagtgtgaaccgatgctcaaagttgaccagcaactgatgtggcagcaagctgcgcgccttgtgcgcggcgtacagtacgccatgacggcgaccggcgcgcgcgaaggggtgattgccctgaaagaaaaataccgctgggccatcgacgcccttaccccgctactgcccgccggtatccgcctgcatattctgccggatgtttatccggcgggcgatgaggtgctgactatctggatggcaaccggccgccgggtcgccccggctgcgctaccggccagcgtcggcgtggtcgtcaataacgtgcaaacggtgctgaatattgcccgggctgtcgagcagcagtttccggtcactcgtcgcacgttgaccgtgaacggcgcggtcgccagaccgttgaccgttactgttcccattggcatgtcgctgcgggaagtactggcgctggcgggcggcgcaacggtcgacgaccctggttttattaacggcggcccgatgatgggtggcctgattacctctcttgataatccggtgacgaaaactaccggcggcctgctggtgctccccaaaagccatccgcttatccagcggagaatgcaggacgagcgcacggtgctttccgtcgcgcgcaccgtctgcgaacagtgccgactgtgtaccgatctctgtccgcgacacctgatcggccacgaactctctccgcacctgctggtgcgggcggtgaactttcaccaggctgccacgccgcagctgctgctgagcgcccttacctgctcggaatgcaacgtttgcgaaagcgtggcctgtccggtggggatctcgccgatgcgcatcaaccgcatgttaaaacgcgagctgcgggcgcaaaaccagcgctacgaagggccgctgaatccgtccgacgaaatggcgaaatatcgcctggtgccggtgaagcggctgatcgccaaactgggactaagcccctggtaccaggaagcgccgctggttgaagaagagccgtcagtagaaaaagtcactttgcagctgcgccagcatattggtgccagcgcggtagcgaacgttgcggtgggagaacgcgtgacgcgcgggcaatgcgttgccgatgtcccgcctggcgcgctcggcgcacctattcacgccagcatcgacggcattgtttcggccatcagcgaacaggccatcacggttgtaagaggttaaccatgtctcaggctataggaattttagaactcaccagcatcgccaaagggatggagcttggtgatgcgatgctgaaaagcgccaacgtcgatctactggtcagcaagaccatctgcccggggaagtttttactgatgctgggcggcgatatcggcgctatccagcaggccattgaaaccggtacgtcgcaggccggcgaaatgctcgtcgacagcctggtgctggcgaatattcatcccagcgtacttccggccatcagcggcctgaacagcgtcgataagcgccaggcggtaggtatcgtcgaaacctggagcgtggcggcctgcattagcgccgcagaccgggcggtgaaaggctcaaacgtcaccctggtgcgggtgcatatggccttcggtatcggcggtaaatgctacatggtggtggcgggcgacgtttctgacgtcaataacgccgtgacggttgccagcgaaagcgcgggcgagaaagggttgttggtttaccgttcggtgatcccacgcccgcatgaagccatgtggcgacagatggtggagggataatggaaagacaaccgacaacggatcgcatgattcaggaatacgtgccggggaaacaggtcactctcgcgcacctgattgctaatccagggaaagatctctttaagaagctgggcctgcaggatgcggtgtccgccattggcatccttaccatcacgccgagcgaagcatctattattgcttgcgatattgctaccaaatccggcgcggtggagattgggtttcttgaccgctttaccggcgcggtggtgctgactggcgatgtttctgccgtcgagtatgccctcaagcaggtaacgcgcacgctgggcgaaatgatgcagttcaccacttgctcgatcacccggacgtaaagtcatgaagcgtttgatgtttatcggccccagccagtgcggaaaaacctcgctgacccaaagcctgcgcggcgaagcgctccattataagaaaactcaggccattgaatggtcgccgatggccatcgatacgccgggcgaatatctggagaaccgctgcctgtacagcgccctgctgaccagcgcctgcgaggccgacgtcatcgccctggtgctgaatgccgacgcccagtggtcgcccttttctccgggttttaccgccccgatgaaccgcccgacgattggcctggtcaccaaggccgatctcgccgagccgcagcgtatttcgctggttgcggagtggcttacgcaggctggcgcccggcagatttttattaccagcgcgttgaataattcgggtctcgacgccgtgctggattttctgaattcgaaggaacctttatgtcttacaaaataatggccattaacgccggcagctcatcgttaaaattccagctgctggagatgccgcagggcgacatgctctgtcaggggctgattgagcgtatcggtatggcggatgcgcaggtgacaattaagacgcacagccaaaaatggcaggaaaccgtccccgttgccgatcatcgcgatgcggtaacgctgcttctggaaaagctgctgggttatcaaatcattaacagtctgcgggacattgacggggtgggccatcgtgtggcgcacggcggtgagttttttaaagactcgacgctggtcacggatgaaacgttagcgcaaatcgaacgtcttgctgaactggccccgcttcacaacccggtaaacgcgttgggtattcacgtttttcgtcaactgttgcctgatgccccttccgtagccgtgtttgatacggcatttcaccagacgctggatgaacccgcctatatttacccgcttccctggcattattacgcggaactggggattcgccgttatggctttcatggcaccagccataagtatgtcagcggcgttctggcggaaaagctgggcgtaccactcagcgcattacgggtgatttgttgtcatcttggaaacggtagcagcatctgcgccatcaagaacgggcgttcggtcaatacgtcgatgggctttacgccgcagtcaggcgtgatgatgggcacccgtagcggagatattgatccctctattctgccgtggatagcccagcgcgaaagcaaaacgccgcaacagttgaatcagttattaaataatgagtcaggcttgctgggcgtttctggcgtgtcgtctgattaccgcgatgtcgaacaggcagccaataccggtaaccggcaggctaaactcgctctcactctgtttgccgaacgcattcgcgccaccattggcagctatattatgcaaatgggaggactggatgcgctggtattcactgggggcattggcgagaactcagcgcgcgccagatcggcggtgtgccataatttgcaatttttgggcttagccgttgatgaagagaaaaatcagcgtaatgcgacatttatccagacggagaatgccctggtgaaagtcgccgtcatcaacaccaacgaagagttaatgatcgcacaagacgttatgcgcattgcgctaccggccacggaagggctttgtgtaccagcctgagagggttaaacgacgcattgcggcaagtcatggtaataatgcttttaccatgacactatgcgcgcacactattcgtacctgaaaggtgataacgtggctgttgcgcaatgccccgcctcatgcggggaacttatccagggatggattctgggcagtgagaaactggtctcctgccccgttgactggtacagcaccgtagcagtcacggctgcgccgccgttggtaaacgagcgtccattgtcgcgggcgatggtggagcgcgttctggcgcactggcagtatcctgcgcactggagtaacgagattcgcgtcgatgtgcgttcgtcaattcccgttgccaaaggcatggccagcagcaccgcagatatcgccgctacggcggtggcaacggcgcatcatcttggccattcgctggatgaaactacccttgcacagctttgcgtctcaatcgaacccactgatagcaccgtttttcatcagttaacgctgtttgatcataataatgcggtcacgcaaatcgcctgcgagccaccgccgccaatcgatttgctggtactggaaagcccggtcaccctgcgcacgcaagattaccaccgtctccctcgccagcagaaattaatagcaagttcagcaaccttgcagcaggcctggaatctggtgcaggaagcctgtataacgcaaaatccgctccgactgggtgaggcggctacgcttagcgctatcgccagccagacgctgttacctaagccgggctttaccgccctgctgtcgctggtcgaagagtgtgatttatacggattgaacgtggcgcatagcggtagcgtggtgggtctgatgctggaccgaaaacgtcatgatattgcgcgcctgaaaggtaagctggcagagaaaaaacttacccgacactggccaaaacaacatttactcaagatggtcacaggcggggtcaaactgcagtgagagcctgatatacgctcccactgccgtagcgcattattcggcttttacatcggcgtgtttcatttcgcccatcgctttcagctttttggaaatgtcgcgacgctctttggagatttcggcatttttaatgatgtagtcatcaacgcgatcttcatagtcgcttttcatactggcgatgataccctgaatcgcctcaacgctcatacctggcttgatgtagtcgctcaggttgtccagcagcagcacacgcttctggttgtcacggatcttcttctcaatgtcctgaatttcacgctgcagtttatttttgcgacggaacagacgaacaaactccagcacgtcctggaaagaaggcttggttgtttccatttttacacccctgataatgtgagattcggattcgttaagcaactgctagtggataaacattacgtttatccccgtcatacttcaagccgccagaggaaacaccgttacgtcgccgtctggggaaacctgaaggttcggggataaaatcgttgccagtagcactcattttatccttatattagtatcatactcttaatctttgctgaatcgaagcagcaacaaattcattcgccccatctgctttttatttgcgcaaagcccggcagatcaaatgtgaaagcagttccaactgtcgggcagtttccatacttagccaaacatagccgtggatgggggtttcagccaccgcgtcgccctgctgctcgttcattagctgccgcaactcggcagcaatatcattcagtttaccggtgtttgccagtaccggctgcgggttgccttcaaacaacgcgtgggcgatcgttagcaaggtttgctgcgtcatctgctgggtttcacgcaatgtgtgcgcgttaagcatcacaaaatggctggcgcgcgtcgcccagtgggcattgatttgtaattcaagcatacaaaccaggttgcggttgatggtctgaatggcctcgaaaatagatttttgtatccgggtttctttactggcaggcgttatcagcccgcgcattttgacgacatcgttcagcaaccgttgcaaatgtttatccaaccgggggcgctccagcaaattcggcgacagcgctgcctgatacacccgattatacgccgtgacgcaatgagccagttggatgcgccagtgcaaaaaggcgcgctggggccagatgccggtaaacaacattgccagtagcgaccccaaaatcacatccccgccacgccataatgccgtatccatatcaccagcgggagcgccgacaacaacggcaagcgttatgcctatcagtagcgcctgatacggttttttccctaaggccagccagccgcacaaaaacatcgctatcgcacaccacaccagcatcagcggtaaggaaaagagctccaggcgtagcgccaccagccctaacgccgcgcccagaatcgtaccgcctatgcgctcaaaagcacgaggcactacatttccccagaatgagatgggccccataatcaccactaacgtgattagcggccatgtgccctcgggaatagaaaacagacgaaccagcagaaaggtaagaatgaacgccagggcgatacgtatgccatgcacgatgcgataatgacggtacaaccgtatttcaaaagggcttaatgacttatcggcacgcacgcttgcgctccttacgggaatggcaaaaaatgcattgtacctgctttatagcaaaaatagcgcactggcggacggaacacattatccgtccgctcttttcagccaggaaaccagtcgttcacttccgctgtaccggaatatacatttcaatatcccagtatccatcttccatgccgttattcagataggtttcaaaacagggcgcagaggctatctgataagcgctatcctgctccaggacatcaaaaaaccgttcccacggcttcgcaaagtcacggtcttccactcgcgcgacagcagtggcatattcgccgccttcaatggcggtcacgattacgccttcgctattgtccggcaggatgaaattctctgccacggacaccacggtatcgcagcggagtttttctgcaggtacgacatctggattgtcgtaatagacggcaatccattcaactggcacgatccgctgtcgatccacccacgtcatcagttgttcaaaaccctgcttcacggtgtgttcccatggaccgaccatgtggaaaccggctatcttgcgtttttgttcctgcctgatttcgtaatccatgctgcctccgtcactttactatactgtatgaatgtacagtataattacagccttttacggtcacaaggacagcgtgatcattttgtgagcaacctcgcaatcccgcccttttgacacctcagatgacggtgaacggtgtgtgacaacggcttacgctttatgctgaaaatagtcgctcagacgagagaacataccgcctttacccaccgactccagagtgaccagcggccactgagcgatcagtttatcccgatcgtatagctctatttcacctacccgttgatgagcggcgattggcgcctccagctcttttctatccagcacatattttgctttgatatgcggaatttccgctttaggcagcgccatccagaaatcctgttccgtacccagcgcaatcttttctttatctccataccagattcgctcgctgcccacttttttaccgctgtgcaaaatctgcaccgtcgcaaagttttgctggccccactgcaacagttttcgcgcctgttcctcacggcctttcgaacttttcgcccccatcacgacggcgataagtcgacgctgcccgtccaccgccgatgcgataagattaaatcccgcccccgatgtgtgtccggttttaagcccatcgatatgcatggtcttatcccacaacaagccgttgcggttctgctgcgtgatgccgttccaggtcaggcttttctcgctgtacatgtgataaaattcaggttcgccgtgaataatcgcccgggagagtacggccagatcatacgcggagctatgttgtcccggcgcatccagaccgtggacggtttcaaaatgggtatcctgcaaattgagttttttcacatagctgttcatcatcgccacaaactgcggctgcccgcccgcgatataatccgccagcgccacacaggcatcgttaccggaatccacaattaagccacggcttaaatcgcgtaccgacacgcgatccccttcttttaaaaacatcaacgaggagccgacaaacaccggattatccttcgcccaggcgtcgcgcccaactgtgacgatatcgtcagggctgatacgatgactatcgatggcgcgatcgacgacgtagcccgtcattagcttggtaaggctggcgggattacgttgctggtgttcattaccggcggtaagaacctgccccgtagtgtaatccatcaacacccaggcgcctgcatcaatggctggcggttggggagcaaaacttacggcatcggccgcaagcgcaggagaaaggtgcatcgcgaataaagaagcggcaataaacaaacggcgtttcaacagcatgtcctcaggatggtctctatttgccgttctttttacggaagttcagttaaacaaacatggataaattgcaagaaaatgtgacacaaggcacattttcttgctgacattattttatggatacgctcagacggcggacttatccccgcgcggcgcggtacgatgacgatgatagccgtcaaccatgctacggaaaatttgtcccggcgtgtcgccaagagtacacagatagagatgcgcgcaaataaacagtaagccgatgatagcaagcgccatatgcagcaccagcatcacagggcccagacccgcaacctgcggatagagacacagcaaaccggtgatgattaacagcggtaccagcgcgtacataatcgccagatatgccagttgttgcagtggattgaacttattctgctctgttgccgcgaacggatgcgcttcccctttcataatgccaaaaaggtaaaaacgcgtctggcgtatgcagcgcgttaccagtccggaaaaatttacccgatagtgacgcccgttacctgtggtgaggttgatcagcacaaacccgacccagaaagccagtaaggcaaaaccacaccaggtatgcacttgtaccattagcgctacagggccgagagaaaaatgaccaaataaaccgcttaacagtaataaaacaaacagtaacgcatttccccaatgccaacggcgaatcgccagcgagtagagatagtcacgatgctcttcgccgcccgccgtttttggcgccagcatccggcgcaataacgcatggataaccagcccaacaagcatgagcagcaccacgacgcctgcataaattaaccacagcggccaataatctggcgcataatgtagttccgctccccagatagtattcatgctttaccctcctgatggatttctttacgacggtacagactgaccgcgccgctacgcgcttcctgctggcgatagacctctttctgaccgacccagcgctggatctcgctctcatccagtctgccgaatttcagcgcgtccgttgggcaaacggatacgcacgccggagactggccagccgccaaccgcgtgtcggcacagaagttacacttgtcggcgacgccggtttgcggattcaaatagcgcacatggaaaggacacgcggcaacacaataatcgcagccaatacagcgcgatttatccacctgcacgatcccgttttcatcacgatatgacgctccggtaggacaaacgctgacacatggcgcattttcacagtgctgacaggagacgcggacaaattgaaaatggattagtgcgttggatgcctgttcaggggcgcgaatttgtacctgtacgcggctaaatccctccggtacgtcattaagcactttgcaggcaacggtacacgcctggcagccgatacaacgtttttcatcatgcagcatgacgtactgattcgttaaatgattcatggttccctcctccctcatgcccggctcagcgtcacgcctgcggtatgcactaccgtaccggataccggactcgtcacgtgcggcagtaaattgccacagtggataccgtgtgtcgtcgccgccgttttggccccagctttagcgccaaatcccatatagacaaaaagcgtgtccgggcggataccgggcgtcaccagcgccttacctttctctttacccgtggcattttccagccagatctcatcgccggtcttaatgcctttttcttgcgccgtttgcggatgaacccagaccgcgttatcccacattagctcgctgagtaaaggtacgtactgcgtcgcgccattggtatgcacggccaccttgccctgaatgaagtaaagctcattctcttttttcagcgcaaagtcacgaacgcgcggaacgccgtagccagggagcaattcctccagggttgcggaataaagttcgattttgccggagggcgatttgaagcgaagctgttcgccataggtgttgtcactgtccgtcgcgatagcgccggggtaacgcgccgtaaactgacgaacggattctggttcgcgtaatagcagcggaacgccccattcgagataccctttctgtcgcagttccttcgctaaggcatggtcgccgttcaactgatagagttggcgcgtctgcatatcctgccacggatagtactgccctaatcccaactgctcgccaagttctttccagatttgccaactcggacgcgcctcgccaatcggctctacgacctgttggcgcagagcgtaagccgggtgcagtcccgacatatcggatacctcttcgtcccgttcgagataggtgcattccggcagcagatagtcggcatatgccgcgctctcgctcaaatagacatcgcagctgaccaccagatccagttgctcaacggtttttaccaggtccgaacgacaggtgacggtctggaaaggattatgccgcgacataatccacgcctttatcgggtaaggcttctgggttaacgccgagtcaataatgctttgcaccacgccgccgccagcggcgatatatttaaactgcggtgcgaccaaatcgatgcgttgcgccgtcggtttcggcatatttttaatgttgagtttcgccagcgttggcgcgaccttttctccggccagtttattgtaaacagacgcgttttttttctgatatagcccgccttcgcgctcaatattaccgagcagcacattaagcgtaaaaatcatacgccgcatatcgatctcttcctgcgagaacgtcgcgcgatgaccaggactgacaatagcgtgaggcgcgcaggcagccagttcgcgtgtcacccggacaataacgtcggctgggacatcggcctgcgcggcggcccattccggcgtcgtctcttttaccgcctgtgctaactgttcaaatccgctggtataacgctcaacaaaagacgcatcgtagagctgttcatcaatcatgacgtggcacatcgccagcagaaccgctaaatcccccccgggacgaatagcgtgccactcatccgccttgctggaaaatatagacaaacgcggatcgaagctcaccattttggcccccttctcctgcgcggtcattaactcatgggtatcggcaacttcaatcccttcatacaaattgtggccaaacgaaaccagatagcgcgtgttagcgatatccatcgccagatcgccgcccatcatcacttttgccgcaatggctttcccggcagggcatgttgaggcgtgagtaaaggtattaggcgaaccaaaggccgtagccagatggaaaagatggctggagagcgagcccgatttggaagagaaagccacgctctcggggccatgctgcgctttgatggcattcattttcgccgcgatttcctggtaagcctgttgccagctaatcacctgccattcaccgtcgccgcgtggcccggtgcgtttcataggttttacaatccgttgcgggtcattgaccaggctgacgccgctcccgcccctggcgcatatgcgcgtcccctgctgcggcgcagaaggattgccctggataaaaacggtcttgttattgactacctgcgcctgaatagggcaacgaaaggaacacatctcgcacaaacttggcgttagcgtggttttaccgttaatgccggcaatcgggttgcgcgccagcgccccgggcggaaaagcgcccagcgcgcaggcagagcagcctatgcctaccccctgcaaaaaagaacgacgactaatgctcatataacctcctgttattagatatagctgaagattatatttaatttgtattatgaaatgtcggcttcaatcacaatttgaaatagttgttaaaatgagcatgccaacacgataaaaccttttattttataaatattttacatttcctgaacacgcacatggactgtcattgaataatcagcagaattaccaaacaacccgctgttaattataaaaatgatacaattccaataacacgtaataatatttaaaagaaaacgattatttcctgaaaagcgatttcacgcgctttacgcagttctttctcatacgcgccggaccgtccgccgacgatatcccgaatgccggcgaaaaaacactggttgagcatcgaagcgggtttacttttgcgtgcacacgggctccgttacccgacccgctctcttatgcctggatttttccgcagatacgtcagcgtcccacaatacggtgacatgatgacagaatggacactttctgaaagaaaccttccagatagcatggtgaattgtgatctccatcgccataccgatatatgaagcttacttttaaggcgttaaaaatccagaccgtttttccataatgatgttgataaggaattctaatgaagatatcatcaggcgcaattaatttttctactattcctaaccaggttaaaaaattaattacctctattcgtgaacatacgaaaaacgggctcgcctcaaaaataaccagtgttaaaaacacgcatgcttctttaaatgaaaaacttaaaacaggaaagagctcatcgattgagttcgcgttaccacaaaaaataaaagacttctttcagccgaaagataaaaacaccttaaacaaaacattgattactgttaaaaatattaaagacacaaataatgcaggcaagaaaaatatttcagcagaagatgtctcaaaaatgaatgcagcattcatgcgtaagcatattgcaaatcaaacatgtgattataattacagaatgacaggtgcggccccgctccccggtggagtctctgtatcagccaataacaggcccacggtttctgaaggtagaacaccaccagtatccccctccctctcacttcaggctacgtcttccccgtcatcacctgccgactgggctaagaaactcacggatgcagttttacgacagaaagccggagaaacccttacggccgcagatcgcgatttttcaaacgcagatttccgtaatattacattcagcaaaatattgccccccagcttcatggagcgagacggcgatattattaaggggttcaacttttcaaattcaaaatttacttattctgatatatctcatttacattttgacgaatgccgattcacttattcgacactgagtgatgtagtctgcagtaatacgaaatttagtaattcagacatgaatgaagtgtttttacagtattcaattactacacaacaacagccctcttttattgatacaacattaaaaaatacgcttatacgtcacaaagccaacctctctggcgttattttaaatgaaccggataattcatcacctccgtcagtgtcagggggcggaaattttattcgtctaggtgatatctggctgcaaatgccactcctttggactgagaacgctgtggatggatttttaaatcatgagcacaataatggtaaaagtattctgatgaccattgacagcctgcccgataaatacagtcaggaaaaagtccaggcaatggaagacctggttaagtcattgcggggtggccgcttaacagaggcatgtatccggccagttgaaagttcgctggtaagcgtactggcccaccctccctatacgcaaagtgcgcttatccgcgagtggctcgggcctgttcaggaacgtttttttgcccaccagtgccagacctataatgacgttcccctgccgactcctgacacatattatcagcagcgcatactgcctgtgttgctggattcgtttgacaggaacagcgccgccatgaccactcacagcggactctttaatcaggtgattttacactgtatgacaggcgtggactgcactgatggcacccgccagaaagctgcagcgctttatgaacagtatcttgctcacccggcggtgtctccccacatccataatgggctcttcggcaattatgacggcagcccggactggacaacccgcgctgcagataatttcctgctgctttcctcccaagattcagacacggcgatgatgctctccactgacacgctgttaacaatgctaaaccctactcctgacactgcatgggacaacttttacctgctgcgagccggagagaacgtttccaccgcgcaaatctctccggtagagttattccgtcatgactttccggtgtttctcgccgcatttaatcagcaggccacgcagcgacgctttggggagctgattgatatcatcctcagcactgaagagcacggggagctgaaccagcagtttattgccgccacgaaccagaaacattccaccgtgaagttgattgatgatgcctcagtgtcgcgtctggccaccatttttgcccccttgcttcctgaaggcaaactcagcccggcacactaccagcacatcctcagtgcttatcacctgacggacgccaccccacagaagcaggcggaaaccctgttctgtctcagtaccgcattcgcacgctattcctccagcgccattttcggcactgagcatgactctccgccggccctgagaggctatgcggaggcgctgatgcagaaagcctgggagctgtctccggcgatcttcccgtccagcgaacagtttaccgactggtccgaccgttttcacggcctccatggcgcctttacctgtaccagcgttgtggcggatagtatgcaacgtcatgccagaaaatatttcccgagtgttctgtcatccatcctgccactggcctgggcctagtccagcctcaacccgcatgaaattaagggacacagcgttgtgtccctctgtacatagacccgttttagtccatgcattttttgagatcccggccagattgcccctggcctaaattccatacagtactaaatcagaaccagtaatttcagatggaccggaatatggtttaccatagagggagcgtagtttagtgtcgctgatggtcattttagtattttgtactcaatgattttaatgtttatgtactcaccatcgcatgtacgaacattagcaacaatatcaattggtgtacaaatacaatcaatcaacgacaaaataaaagaataaaatatttcatatacagataacatcaggcgtgtacatcaagtgacagttaaaaacgacagcatacagagcacattcctcttccacgattacgaaaccttcggtacgcatccggccctcgacagacctgcgcaattcgccgcgctccgtacggataacgacttcaacgttatcggcgagccggaggtgttttattgcaaacccgccgatgattatctaccgcagcccggcgcggtgctgattaccggcatcacgccgcaggaagcgcgtgagaaaggagaaaacgaagccgctttcgccagacgcattcatgcgctgtttaccgttcctaaaacctgcgttgtgggctacaacaatgtgcgttttgatgatgaagtcacgcgcaatattttttatcgcaacttttacgatccctatgcctggagctggcagcatgataattcacgttgggatctattggatgtcatgcgcgcctgttatgcgctgcgcccggagggaattaactggccggaaaacgacgacggcctgcccagctttcgtctggaacatttaacccaggcgaacgggatcgaacacagcaacgcgcatgatgcgatggcggatgtctacgccactattgcgatggcgcaactggtgaaaacacgccagccgcggctgtttgattatctttatagccaccgcagtaaacataaactggcggcgctgattgacgtcccgcaaatgaagccgctggtgcatgtctccggcatgtttggcgcgtggcgcggtaatacaagctgggtcgcgccgctggcgtggcatcctgaaaaccgtaacgcggtgatcatggtcgatttagcaggcgatatttctcctcttcttgagctggacagcgacacccttcgcgagcggctttatacggccaaagccgatcttggcgatcacgccgcagtgccggtaaagctggtgcatatcaataaatgtccggtactggcgcaggcgaataccttgcgcccggaggatgccgaccggctgggaattaaccgccagcattgcctggataacctgaaagtgttgcgtgaaaacccgcaggttcgcgacaaagtggtggcgattttcgccgaagccgaaccttttgccgcctcggataacgttgatgcccagctctatgatggttttttcagcgatgccgatcgcgcagccatgaaaatcgtactcgaaaccgagccacgtaacctgcccgcgctggacattacctttgtcgataagcgcattgagaagctgctgtttaattaccgcgcacgcaattttcccggtacgctggatgacgcagagcagcagcgctggctagagcatcgccgtcaggtgctgacgccggagtttttacaacaatatgccaatgaattgcagatgctttctcagcagtatgcggaagataaaacgaagctggggttgctgaaatcactgtggcagtacgcaactgagattgtgtaattgaccaatgcctgacgagcattgttaatccagagcggataaagagtgacgccgccatccggtaaacgtgctggatgacaaacaaaaaaccggaggcactgcctccggttttactattgccgataatacgcgcgattacgcgacgtcttcgtactgtggaaccgggttgcggaagcttttagttacgcacgccagataaatcagcccgatacctgcccagatcaggcccagtaccattgagctctcttccaggttaacccacaacgcgccaaccgtgagcgcgccgcacatgggcaggaacagatactggaagtgatctttcaacgttttattacgcttctcacggatccagaactgcgaaatcaccgacaggttaacaaaggtaaacgcgaccagcgcaccaaagttaatcagcgccgtcgccatcaccaggtcaaaattaatcgccagcagcgcgatcgccccgaccaggatgatgttcatcgctggcgtacgccatttcggatgaacgtaaccgaagaagcttttcgggaatacgccgtcgcgccccattacgtacatcaggcgcgctacgcctgcatgcgccgccataccggaagccagtacggtgatagtagagaagatcagcgcgcccacctggaaggttttacccgccacgtacagcatgatttccggctgagacgcatccggatctttaaagcgagagatatccgggaagtacaattgcaggaaataggttgcaaagatgaagatcaggccgccaatcagcgcggtcagaaaaatcgcacgcgggatcacgcgctcagcatctttggtctcttccgacaggttactgatgccgtcaaagccggtaaaggagaagcacaggatcgtcgctcccgtaatcatcgggataacgtgcgcatcgccggaccagaacggacgggtgctcgccagcgtaccggcgccttcgccttcaaatacgccataaaccaccatgcccagaatgaccgcaatcagcaccacctgtagcactacaatcacggtgttgaagttagcgaccgatttgaggctgcgcaggttaaaggccgtcataaaggccaccagcgccacgacaaacacccatgacggaatggagggcaccagcgcttcaaaataaattttcgccaacagaatgttgatcatcggcgcgaacagataatcgagcagagaagaccaacccaccataaagccaacggtcgggctgatggatttctgggcataggtgtacgccgaacccgcggaaggatagcgacgcaccagtttcccgtagctcaacgccgtaaacagaatcgcgattaacgcgaatgcatacgccgtcggtacgtgaccgtcagtgaggcctgaaacgataccaaatgtatcgaacagcgtcatcggctgcatataggcaagacccatcattacaaccggaactaacgtaagcgttttacgtaattccacgcgagaggtgtttggagtaacgttatgcgacatggtcattctcctttacggcgaatgccgtcgcgtaagcaaaaaattgccccattttctggattcctcagcgacaacaactgtcgatttttaagtaagtatctatccggtacgaagcccggcctcttggtattgaatgatgtgtttgaagcaaaaaaataaccgacgcgtattaaaacgtcggttagtgtcattttttgcaagcggcgtattctgccctaaattgaagtgaaatgacaagagaatgcgagcgcgttcaaaaaattatttttcataagcgattgatttttaaaccgtcgattttgcatacaccccagcaatagcattatttgctaaaatttcatcccgccaccagccgctggccagcccggcggtctgttcattccagccaacccacaccggttcatagacgatttgcgccacaactttcttctctataagcgcgccgctttccaaaaatcgctgcgccagataacgcggtaaatagccgcatcccaggccgctaatttgcagctccagcttggttttaaaatcaaacacggtaatcgcttcctgagcgtcgagcagttcagaccctattgatcgcgaggaatggacgctatcgccaaccacaatcgcgcgaaaacgtttgatcgtctggcggctaagcggttcctcttcatgaaccagcggatgatgcggagcgacagcaaacaccagttcaagatcgcccagtcttgcaaagccaaagccggtgtcaggcggcggcgcgcgcatggcgccaacaataatatccgcccttccctgcgtcagcgtctcccatgaaccgccgagaacgccattgacaaatttaaggcgcgtcacgctgtggcgttgataaaaagcgtcgataagcggggccagaagagaaaagggaaaggtatcatccacaccgatgaccagttcgttctcccagccttcatgcagtttaatcgcctgcttttccagctcgcgaacggtgtgcagcacttcacggcctttttccagtagcatcttaccggttcgcgtaaatcgcgcgcgatgcccgctacggtcgagcaattggatattaagatcgttttccagcttatgaacggtataactgagggcggacggcgttttaaataattttgccgacgccgccgcgaagctgccttctttttctaacgcatcaagaataatcagaacgtccagcagtggtttcatactcgtccccttgcgctatatggcgaccacctgctggacagcgactcactccatcggcatcaccagcggatcgggatattgatattcaaatcccagctcattacaaatccggctaccgtcgataatcttccctttgccgttgtccggtgcgttacgaaaatgcggcggcgccattcccagcaagcgcgtcatttgcggataaaacacgttgcgggctggatgcgccggcgcacatatattatagatgtgccccccttttggcgcctgtagcaaaagggtaattgcgccaaccacgtcttcaagatgcaccagattgaccccgtgttgaccatccggcgcggtttttccggcaaagaaacgaccgggatggcgtccaggcccgaccaaccccgccagccgcagaatatctactgacgtgcccggcagattatgcagccaatcttccagttccttcagggtacgcccgctggccgtgaccggattacgcggcgtattctctttcaccacgccttgcgcatcgccgtaaacagacgtcgaactggtaaaaataatacgcgggatacgataagccagcgcgctgtcgaccagctcctgcatcgcctgcagataaaaatcctctcccggaccgctacggcgcgcgggcagtgttatcaccagcgcatcgacatccagcagagcgtcaagatcgtccgcctcacagaccagctccggctccagacgcagcggatagctttcaattccactcatacgggccgcttccaccccgtcaagggtggttttgctgccggtaacctgccagcctctcgctgccagcgacattgccagcggcatgcctaaccaacctaaaccgacaattgcgacctttttcatccattttctcctgactttaacgccttatacataaggctacgccagcccgccgtgactgacaattcatactataaatgcgaaatgaaaaaagcgcttgctttaaggcgtaaaagtggtttaggttaaaaggtatcaaatgaataagcattcatcggaatttttatgacacgcgttcaatttaaacaccaccatcatcaccatcatcctgactagtctttcaggcgatgtgtgctggaagacattcagatcttccagtggtgcatgaacgcatgagaaagcccccggaagatcatcttccgggggcttttttttggcgcgcgatacagaccggttcagacaggataaagaggaacgcagaatgttagacaacacccgcttacgcatagctattcagaaatcaggccgtttaagcgatgattcacgagaattgctggcccgctgcggcataaaaattaatttacacactcagcgcctgattgcgatggcggaaaacatgccgattgatatcctgcgcgtgcgtgatgatgacattccgggtctggtgatggatggcgtggtcgatctcggcattatcggcgagaacgtgctggaagaagagctactcaaccgccgcgcgcagggtgaagatccgcgctattttaccctgcgccgtcttgacttcggcggctgccgtttatcgctggcaacgccggttgacgaagcctgggacggcccggccgcgctggacggtaaacgtatcgctacctcttatccgcacctcctcaaacgctacctcgaccagaaaggcgtctcttttaaatcgtgtctgttaaatggttctgtcgaagtcgcgccgcgcgcggggctggccgacgctatctgcgatttggtctctaccggcgcgacgcttgaagctaacggcctgcgtgaagtcgaagttatctaccgctctaaagcctgtctgattcagcgcgacggtgagatggcacagagcaagcaacagctgatcgataaattgctgacccgtattcagggcgtgattcaggcgcgcgaatcgaaatacatcatgatgcacgcgccaagtgaacgcctggaagaggttatcgccctgctgccaggcgccgaaaggccgacaattctgccgctggcaggcgagcaacagcgcgtggcgatgcacatggtcagcagcgaaacgttgttctgggaaaccatggagaaactgaaagcgcttggcgccagctcgattctggtactgccgatcgagaagatgatggagtgatctgacgcctgatggcgctgcgcttatcaggcctacgtaatgcgttgatattttgggttctgtaggccggataaggcggaaccctgtgatggagtaaagaccatgagcttcaataccctgattgactggaacagctgtagccctgaacagcagcgtgcgctgctgacgcgtccggcgatttccgcctctgacagtattacccggacggtcagcgatattctggataatgtaaaaacgcgcggtgacgatgccctgcgtgaatacagcgctaaatttgataaaacagaagtgacagcgctacgcgtcacccctgaagagatcgccgccgccggcgcgcgtctgagcgacgaattaaaacaggcgatggccgctgccgtcaaaaatattgaaacgttccattccgcgcagacgctaccgcctgtagatgtggaaacccagccaggcgtgcgttgccagcaggttacgcgtcccgtcgcgtctgtcggtctgtatattcccggcggctcggctccgctcttctcaacggtgctgatgctggcgacgccggcgcgtattgcgggatgtcagaacgtggttctgtgctcgccgccgcccatcgctgatgaaatcctctatgcggcgcaactgtgtggcgtgcaggaaatctttaacgtcggcggcgcgcaggcgattgccgctctggccttcggcagcgagtccgtaccgaaagtggataaaatttttggccccggcaacgcctttgtaaccgaagccaaacgtcaggtcagccaacgcctcgacggcgcggctatcgatatgccagccgggccgtctgaagtactggtgatcgccgacagcggcgcaacaccggatttcgtcgcttctgacctgctctcccaggctgagcacggtccggattcgcaggtgattctgctgacgcctgatgctgacattgcctgcaaggtggcggaggcggtagaacgtcaactggcagaactgccgcgcgcggacaccgccaggcaggccctgagcgccagtcgtctgattgtgaccaaagatttagcgcagtgcgtcgccatctctaatcagtatgggccggaacacttaattatccagacgcgcaatgcgcgcgatttggtggatgcgattaccagcgcaggttcggtatttctcggcgactggtcgccggaatccgccggtgattacgcttccggaaccaaccatgttttaccgacctatggctatactgctacctgttccagccttgggttagcggatttccagaaacggatgaccgttcaggaactgtcgaaagcgggcttttccgctctggcatcaaccattgaaacattggcggcggcagaacgtctgaccgcccataaaaatgccgtgaccctgcgcgtaaacgccctcaaggagcaagcatgagcactgaaaacactctcagcgtcgctgacttagcccgtgaaaatgtccgcaacctggtaccgtatcagtctgcccgccgtctgggcggtaacggcgatgtctggctgaacgcgaatgaattcccgacagcggtggagtttcagctcacccaacaaacgcttaaccgctacccggaatgccagccaaaggccgtgattgaaaactacgcgcaatatgctggcgtaaagccggagcaggtgctggtcagccgcggcgcggatgaagggatcgagctggtgatccgcgccttctgtgaaccggggaaagacgctattctctactgtccgcccacttacggtatgtacagcgtcagcgccgaaaccattggcgtagagcgccggacggttcccgcgcttgaaaactggcagctggatctacaggggatttccgacaaccttgacggcacaaaagtggtgttcgtttgtagccccaataatcctaccggacaacttatcaacccgcaggatctgcgcacgctgctggagttgacacgcggtaaagcgatagtcgtcgccgacgaagcttatattgagttttgcccgcaggccacgctgacaggctggctggttgaatatcctcatctggttatcctgcgcacattgtcgaaagcttttgcgctggcgggtctgcgctgcggctttacactggctaatgaagaggtgatcaacctgctgttaaaagtgatcgccccttatccgctttctacgccagtggcggatatcgccgcccaggcgctgagcccgcagggaataaacgcaatgcgcgatcgcgtggcgcagacagtgcaggaacgtcagtatctggtgaatgccctgcaacagaccgcctgcgtagaacacgtctttgactctgaaaccaactatattctggcgcggtttaccgcctccagcagcgtgtttaaatccttatgggatcagggcattatcttacgcgatcagaataaacaaccttctttaagcggctgcctgcggattacggtcggcacccgccaggaaaaccagcgcgtcattgacgccttacgtgcggagccagtatgagtcagaagtatcttttcatcgaccgggacggaaccttaatttccgaaccgccgagcgattttcaggtagaccgctttgataaactggcctttgagccagaggtgattcccgtattgctgaagctgcaaaaagccggttttaagctggtgatgatcactaaccaggatggacttggcacgcaaagcttcccgcaggcggacttcgacggaccgcacaacctgatgatgcagattttcacctctcagggcgtatgctttgatgaggtgctgatctgccctcacctgcccgcagacgactgcgactgccgcaagcccaaagtgaagctggtggagcgttatcttgcggaacaagcgatggatagcgccaacagctatgtgattggcgatcgtgcgaccgatatccagctcgctgataacatgggcattactggtttacgctatcaccgtgaaacgctgaactggacgatgattggcgaacagctaacgaaacgcgatcgctatgcgcatgtgatccgtaacaccaaagaaacacagattgatgtcagtgtctggctggatcgcgaaggcaacagcaagattaataccggcgtcggcttctttgaccatatgctcgatcaaatcgccacccacggcggctttcgcatggagattaccgttaagggtgatctctatatcgacgatcaccacacggtagaagatactggactggcgctcggtgaggcattaaaactggcactcggcgacaagcgcggtatctgccgttttggctttgtactaccgatggatgaatgtctggcgcgctgcgcgctggatatttccggtcgtccgcatctggaatataaagctgaatttacctaccagcgtgtgggcgatttgagcacagagatgattgaacactttttccgctcactctcttacacgatgggcgtcactctgcatctcaagactaaaggtaaaaacgatcaccaccgtgtcgaaagtttgtttaaagcctttggtcggacgctacgccaggctattcgcgtggagggcgatacattaccgtcctcgaaaggagtgctgtgatgaacgtcgtcatccttgacaccggctgcgccaatttaagctcggtaaaatccgccgtggcgcgccacggttacaccccggtggtcagccgcgaagcggaaatcgtattacgcgctgacaaactctttctgcccggcgtcggcacggcgcaggccgctatggatcaactgcgcgaacgtgaactgatcgacttaattaaagcgtgtactcagccggtactgggtatctgcttagggatgcaactgctgggtcgtcgcagcgaagagacgcgcggcgtggatctgctgaacattatcgaacaagacgtgccgaaaatgaccgactttggtctgccgctgccgcacatgggctggaatcgcgtgtatccgcaggcgggcaaccggctgtttcagggcattgaagatggcgcctatttttactttgttcacagctacgcgatgccggtcaacccgtggactatcgcccagtgcaattacggcgagccgtttaccgcggcggtacagaaagataatttcttcggcgtacagttccatccggaacgttcgggcgcggcgggcgcacagttgctgaaaaacttcctggagatgtaatgattattccggcattagatttaattgacggcaccgtggtgcgtctccaccagggcgactacgcccggcagcgggattacggtaacgatcccctgccccgtttgcaggattacgccgcccagggcgccggggtgctgcatctggtagatctgaccggcgctaaagatccggctaagcgacagataccgctgattaaaaccctggtcgcgggcgtgaacgtgcctgttcaggtcggcggcggcgtgcgtaccgaagaagacgttgcggcattactgaaagctggcgttgcccgtgtggtcatcggttcaacggcggtgaaatctcctgacgtggtgaaaggctggtttgaacgttttggcgcgcaggcgctggtactggcgctggacgttcgcatagacgaacacggcaacaagcaggtggcggttagcggctggcaggaaaattccggcgtctcgctggaacaactggtggagacctatctccccgtcggcctgaaacatgtactgtgtaccgatatttctcgcgacggcacgctggcgggctctaacgtttcactgtacgaagagatatgcgccagatatccgcagatcgcctttcaatcctccggcggtattggcgatatcgatgatattgccgccctgcgcggcaccggcgtgcgcggcgtgattgtcggacgcgctctgctggaagggaaatttaccgttaaggaggccatccaatgctggcaaaacgtataattccgtgtctggatgttcgtgatggtcaggtggtgaaaggcgtacagtttcgcaaccatgagatcattggcgatatcgttccgctggccaaacgctatgccgacgaaggcgcggacgaactggtgttctatgacattaccgcctccagcgatggtcgcgtagtcgataaaagctgggtggcgcgcgttgccgaggtgatcgacattccgttttgtgtagcgggcggcatccggtcaattgacgacgccgccaaaattctttctttcggggcggataagatctctatcaattcccctgcactggctgacccaacgctgattacccgtctggctgaccgttttggcgtacagtgcattgtcgtcgggattgatacctggtttgacgacgccacggggaaatatcatgttaaccagtataccggcgatgaaaaccgtacccgcgtgacgcagtgggagacgctggattgggtgcaagaggtacaacagcgcggcgcgggggaaatcgtcctgaatatgatgaaccaggacggcgtgcgtaacggttacgatctgacgcagttgaaaaaagtccgtgacgtttgccgcgtgccgctgatcgcctccggcggcgcgggcacgatggaacactttcttgaggcattccgtgatgccgatgtcgacggcgcgcttgccgcctccgtttttcacaagcaaatcatcaatattggcgaattaaaagcgtacctggcaggccagggcgtggagatcaggatatgttaacagagcaacaacgccgcgagctggactgggaaaaaaccgatggcctgatgccagccatcgtgcaacatgcggtatccggcgaagtattgatgctgggctatatgaacccacaagcgctggacaaaaccattgaatccggccatgtcacgttcttctcacgcacgaaacagcgtttatggaccaaaggcgaaacctcaggccatgtgctgaatgtcgtcagcattgcgccggattgcgacaacgatacactgctggtgctggcaaatcctgtcgggccgacctgccacaaaggtaccagctgctgctttggctacgccggccatcagtggttattcctgtatcaactggagcagctactggcagagcgcaaaaccgccgatccggccagctcttacacggcgaaactgtacgccagcggtaccaaacgtattgcgcaaaaagttggcgaagaaggtgtagaaaccgcgctggcggccaccgtcaatgatcgttttgaattaaccaatgaagcgtctgatttgatgtaccacctgctggtgctgttgcaggatcaggatctcaacctcaccaccgtgatcgacaatcttcgtaagcgtcatcaataagcataaaaaaccgggcaacgcccggttttttatgagaaattttacctttcgaagccgaccaccatccggcaaagaagcttacaaggcttttggcttatagctacgtagcgcattgcgccccagcacaatcccggcaccgatcatcccgcccagcaatacagccagcacaagggtaatggcttttttcgggctatcgcgacggaccggcagcgtcggcttcatcacataacgatagacgtgcaccgtatcggcagtcactttcagatttttaatgtccagcagtgtctgcttcgtctggtaataggccggagaaaagaccagtggacgcgtcgcttcgttctgtatcatcgattttagcgcatcgctccccagcaggaacatcgtgtcctgggtaacatcctgggtttgctgaatctgcggctgcgtgattttggcctcatccgcatagcgcaacgcttcttcgatttgcttaatacgcagatctttttgctcctgcgccacaacttcctgcgtctcaagggactcctgcaacgttttggtttgcagcgtgatgttatctttcaggtcaacttccagttccttagcgacctcttcatccacctgttggatatattccgccagccgacgctgcgccccttcagcggtagtactcacataagaaaccgagagtggcagcgcctgcccctttaccgactgttcaatggtgagcttttcccgctctttctgattatccagcgcttccgataatgcggaaaacgcagagctaaagcggcttataaaattcgcctgcacttcagagattttgggggcattcccgccatacaagacgttgagcgcattggtataggtggcaacctgcgcggcatcaggttgggtaataatcgccgtggatgtccatttttctttggctatcatcaggtagcctacggccagcaaaatggcgataataacggctacaataatggtcatcttcccacgccataactgtagcaataactcaatcaaatcaatctgttccggatcgttcccacgcccggaagacgtattactatccactgtcatagataccctaactaaaaaaaggatgaagctggagacagtgtagtcataaagcaaatatatgccataggattaatgataaaaatcagacattatttccatttggtcaataaatcatcgggactcatcagccccgattgccttattaatcactaccgaaaagatcgcgggtatacactttttcagcaacatccaaaagctctgccgccatcctgttggaaataatgacatccgcctgctgtttaaagcagtgcaaatcacgttcaagacgtgagttaaagaaagtatcttcttccattaccggctcatagatgatgacctctacgcctttcgctttaatgcgcttcataatcccctgaatcgatgaggcgcggaagttatcggagccactcttcataatcaggcgataaatgcccaccactttaggctttctggcgaggatagcgtcggcaataaaatctttacgcgtacggtttgcttcaacgatagcggagataatattattaggcaccgactgataattggccagcaactgtttggtatcttttggcaaacaatatccgccataaccaaaagagggattattataatgattgccaatacgcgggtcgaggcacaccccttcaataatttgtcgggtatttaatcctaacgtttcagcatagctgtctaattcattaaaataagcgactcgcatagcgagataagtattggcgaaaagtttaatagcttccgcctcagtggagtccgtaaacagcgttggaatctcctgtttaatagcgccttcctggagtaatgcggcaaattctctggcgcgctcagactgttccccaatcacgatacgggagggataaaggttatcgtaaagggctttaccttcacgtaaaaactccggagagaaaatgatattttctgtcgcaaacttctgacgcattgccgccgtgaagccaaccggcaccgtagacttaataatcatcacggctgcggggttgatgctgatcacatcctgaatgaccgattccacactggacgtattaaaatagttggttttgggatcgtaatccgtaggcgtagcaataatgacgtaatctgcattctggtacgcatcaaacttatccagcgttgccctgaatctgatgttatcttcctttaaaaattgctgaatttctttatcaacaatcggagatatccgatcatttaacagttcaacacgggaaggaacaatgtctaacgccaccacatcatgatgttgtgcaataagcaaaccattagacaagccaacataacccgtcccggatatcgtgattttcattattcgctctcagaattaacttaattatgaatcatgatgtatttcgcatcctgataagatattaaagttttaacgcctgagtatataaagtgcaacgcagacgaaaacaattcagattatcttcattacgataaacacagattattaagttaatattaagcaaaagcgataaatcaataagaatagagataaaaaaaagcccggtattaaaccgggcttaaacatttttgcagaaattattccaaccactcggtatggaaaatgccttctttatcagtacgtttataggtgtgcgcaccaaagtagtcacgctgcgcctgaattaagttagctggcagtactgcggcgcgatagctgtcatagtaggccactgccgcagagaatgtcggcaccggaatgccgttctgcaccgcgtaagccacaacatcacgcagcgcctgctggtactcatcagcaattttcttgaagtaaggcgctaacagcaagttagcgataccagcgttttctgcgtaagcatcagtgatcttctgcagaaactgagcgcgaatgatacagcccgcacggaaaatcttagcaatctcgccgtagttgagatcccagtgatattcatcagacgcggcgcgtagctgcgagaagccctgcgcataggagacgatcttgccaagatacagcgcgcgacgcactttctcgataaattcagctttgtcgcctgccggctgcgctttcggcccggagagcactttagatgcggcaacacgttgcgctttcaacgaagagatgtaacgcgcaaagacggattcggtaatcagcgacagcggttcacccagatccagcgcgctctggctggtccatttaccggtccctttgttggcggcttcatcaagaatgacatccaccaggtagtttccgtcttcatcttttttagtgaagatgtctttagtgatgtcgatcagatagctgctcagctcgccgttattccactcagtaaaagtgttcgccaactcttcattgctgagattcaggccgcctttcagcagggagtaagcttcagcgataagctgcatatcgccatattcaataccattgtggaccatcttgacgtagtgaccagcaccatcggcgccgatataggtcacgcacggttcgccatcttccgccacagcagcaatcttcgtcaggatcggcgccaccagttcataggcatctttctgaccgccaggcatgatagatggccctttcagcgcgccctcttcaccaccggaaacaccggtaccgataaagttaaaaccttccgcagacagctcgcgattgcgacggattgtgtcctggaagaaggtgttaccgccatcaataatgatatcgcctttttccagatacggtttcagcgaatcgatagctgcatcagtacctgcacccgctttcaccattaacaggatacgacgaggcgtttcgagggattcaacaaactctttcaccgtgtaataaggcaccagctttttgccgggattctcggcaatcacttcttcggtcttttcacgggagcggttgaaaacggagacggtataaccacggctttcgatgttgagcgcgaggttgcgccccatcactgccataccgacgacgccgatctgttgcttggacattacatactcctgtcaggtgtggaaaccctgccacaaacggtcatggcaggttaaaggtgaatagtatgttaactcaaaggtatgatattaaggtagcgattgatgcgttcagattttacgcaggctattttatacaattattattcagtacttctcggtaagcttaatacgcaccatctcgccgcaaaacaactttcgctgttttaaacagaatggcaatatcattccaaagcgtccagtttttaacataccaggaatcaaaataaacacgagtgtcataatcaacatcattacgcccactcacttgccatagacctgtcatgcccggctttgccatcaaataataatcaacatcatcacaataacgctccagttcatccgaaacgataggtcgtggtccaaccaggctcatatcaccttttagtacattaaaaagttgtggcaactcatcaaggctagttttacgtataaatcgacctacagctgtgattcgaggatcatttttcagtttaaaatctttctcccattcagccctggcaataggatcgttagccaaaagttcttttagtacctcttgagaattcataaccatagaacgaaatttgtagcatggaaaaagttttccatgccgacctactcgctggtgaccataaatagccggaccaccatctcgagtaactttataccacagataaatcataagtggtgatgcaattataagaatcattattgaacaaacaatatcaaatgtccgtttgagaaaacgggacgaccttttagccaagttattttgtatccttaataacataacttcatggctaaagataaaagacatatcagtattatataatggcaatcctctaaacgaggggactacagtaacagaacgacaatgatgttttgaaagttcacgtagccaaaaatgtgttttctccaactcggtgtattcataagcaaggatataatggacatcacctgtacgatttaaatcccaaataatctcagtatcctttatcaccggcaacatatttatttcagcatctgacgcatccgtatcaaaaaaagcgataacatcaaaccccatcatctcctcactttgcagcgcagaatatgcaccacgagcattctgtccgctccccaggatgatagtttttttcttccagatacctagcttgttcaataaatgctttgtaagtgcgcgaaaaaaaggcaccaggattagagcaaaagtccaacaaaacacccagacatagcgtgaaaactgccattttgtaaacgctatcagagccaaatcaaatatagcaaaaataacgatcgtacgaaaaatttcttttaactcataccaaaatggcttgcggtatgtataatgtcgcaaacgaatccaaaaccaaccgacacatactactgacaaaataaaatgcgtaataactcttgtatctaattggtcttgaggaataaatcgctgtacttgatcaaaaataaaatagacacatcctaatgaaaaccataaggctaaattaaaaaaaatcaaatccgatatagccaaaaaaattttacatagctgtggattatacttattatcaatattatccatttaatcctcaccctctgaccgtgcataatgtaaataaaataggcatattaagtaaataacattcaattttttacagcaagcatcgttttttaatattagcaagcgttgtatttacaagatcctgagccctatttaataaattagcttctgcatagcagcgtaactcaggtgcattaccagaagcgcgcaaatgcacaatacatccatcacgtaaagtaattcgcataccatctgtcatatctgtagaaattgcaccttcattctccaaaccaatatagcttaagaggttgctcagattttctctgcccatactaattaaggattgacttttatcagttgtaatcccctgtaatctgtcagaatgggtgtaacgagttgggagttcattgactaaagcgctaatgctggtattcctacttttgtaaagcagcattattgctggtaatacagcatcacgagttggtaaggcatgaagattctgctcgttaatacagatgtcgcttcctaataaaaaaccgccattggcttcaaaaccgacaatacgactataactccgcgataattcattaaaagcttcgataacataaggcgagccaatttttgtaagcttaacatgtttaaaaaagcggccagaagaaattatgctgttacaactaacaggaatagcgacggcttctgcatccaatgcaagtgaacataatagacctagtatatcgcctcttagccactcaccggcctcatcagcaataagagggcgatcaccatccccatctgtcgagaatatggcatctaaatcgaactctttagcccatgagcgagctttttcccgatcctctttgcttacagcctctgtatctataggtacaaaattatcgcttctacccaagctaacgacttcagcccccaatgcaataaataaaggcttataaagatcacgcccagcgcttgaatgttcgtaaataccaatacgcttatttttcaggaatggagtagaaaataaagatgtataacgagatatataattaacagcagccatttctgaaactatgagttctttaagctctaaatggctgcacgtatcttcaacactaaggatcgcagcctcatcatgtttcgtgatttcaccatcaggacgataaaacttgaggccgttccgctcgaatggaatatgacttcccgtaaccattatcgcaggcatattgtcagacatagactgaaaggccaaagctggggttggtaccactccataaaaaatacagttaacgcctttatccgccaatgcagcagcacacgcctgagccatcccataactacttggacgattatctattgccaatgctacggtatcaaaggaaaaatgttcctgcataacggcaacaaatgaaaccgtaaaagcagcacatacctgaggtgtaaaatcttttacaagaccgcgagccccactcgttccaaacacaatacctgatgaataaataacatcacggctattattaactacgttcattagtccactccttcgaaaatccagaacgttgttctaaacgaataatatcatcctcaccaagataggtacctgattgaatctcaattaacttcaggggggtcattccaggattttccagcgcgtgaatagtattcggaggaataaatgttgattcattttcagaaaccatataaatctgctctccctttgtaacacgagcagtcccggataatactatccaatgctcagcccggtggtgatgcatctgcgccacaaatttctcacccggcttaacagtgatacatcgaacgaggtaatttttgccgctatcaatcacattatattttccccaggggcggaaaacttcttgatgatgtttatattcgttcctatcattccgttttaaataatcgacaatttttttaacatcttgtactgtatctttattagccaccagtaaagcgtctgttgtttgaacaatgacaagattgcttacaccaatcgcacttataaacatatcttcggaataaatgtaattatcattacaagcatgtgcgaagatatctccttttaaaacatttctctgatgatctttattcgatatatcccaaagtgaggaccaggaacccacatccgaccagccagcgctcattggtatcaccaccgcatgctgtgtgtgctccataactgcataatcgatagaatcactcgggcatgacataaactcttctttatcaatacgaataaaatcaagatcgggatttatatgtcctaccgccttttcacaagctttataaatttcaggtgataaatactttaattcgtttaaataagagcttgcacgaaataaaaacataccgctattccagtaatatttccctgatttgaaatagtcaccggcggtatcgatatccggtttctccacaaattcagccactgcataagcgtcatttcctatcaactcaccacgacgaatatatccataacccgtttcagcatgcgttggaacaataccaaaagttacaagcttaccatttgcagcgtattcttcagcatgtctgacagctttcgtaaaagctatttcatcctgaatcacatgatctgcagcaagaaccaacaaaagaggatcagcattatcagcattctggagcgcacaaaacgcggcaagagcgatcgctggtgcagtattacggcctaccggttcgagaataatattatttgctaacttgtcaatttcacggagttgttcagcgactaagaaacggtgtctgtcattgcaaatgacaacgggttcttctgtagaaagtgaagctaatcgctttatagtattttgcagcattgatagtttaccttcaacgcttagaaactgcttcggatgatattcgcgtgaaagcggccataaacggctacctgtgccgccagccataattacgggaagaaaagacatttattttatctcttttgacgaagaatattggatattattccaataactcttgtacatgctaaaatagcgacatgtagacaacggtaaagattgccaatgcttgcctaatttgtaacccaagaatttagcaaaggttgttaataaagctcttggaatccagaacggtgcatttttaagcaggaattgaatctctgattttacgaagcggaaaccctcaccaccggctccgccaaagtcacgctgaatccacggagaacaagcatgaaatacaccagtatcaaaatatcgttgaaactcttctcgcggggtataattatgggagtgtcttaccaccgcttcagcgcagtaggcgaccttataacccgcctgaatcatcttagccgccataaacatatcctcggcaagaattgtatgttcaggaaacccacttaactcttcaaaaacggaacggcgataggcagcaaaagaattggacataaatacagttttaatacccaatttttctatatctgccttacttttaacaatagattttgaactataattaaaatttctggcatgcactgcaaggggattagcatctttatgaggaagttgtctaccacaaaccgctgctatcaatggatctgaaaaataataaaccaaatttttaattgcatccgaatccgcgagaattgcatcttgcgttagaaaaattataacatcagcgtccagagtttttgcaactgctaaatttctggttcctccatgattaaaatctttagagtcaatattaaatattgatatatttttcaggtctgaggctaacggaaccgtttcatctttagaacctgagtctataacaatcaatttatccggatatatagtttgctgcttaatcgcatccagaacattaggccaaagcgaccctgcattatatgtgggaataattaatgttattttcatttattttgattccgccaaccaattgccaaccatctgcttcatattatcaaagtcataccgtgcgacatagttgttaaatcgggaaattgcatcaggcaactgctctatatttttaattgcactctgccagcttttttcatcatccggattcacatataatgcaccattggttaacacttcatgaaatactggtatatcggacactataactggagtatttgatgccatcgcttcaataggaggtataccaaaaccctcatcaatagatggataaacaagcgcgtaggctttagaatataaaatctttaattcattaaatgagacttcatgtaaaaaagtcactttatcttttagttccagatcaacgaccatttgttggagagacattgcatagtcagtacgaccacatacaataattaaattataagagtcagaccaaacttttttattttttatgaatgaatgaatatttttatgtggccaacttgcaccaacagctaaaaagtaattctctttttcttttttttgtataaaatcagatttattaacactattataaattactgatattttctcactatctacattataagttttagcaatgctatctttaacggtataagataccgttaaaacatgcttacatcgcttaacggacatttttaataaaaagcgaaaatacactttctgaataaaactatctggataataaaaaggtcttatatcatgtacggttatcgtttggtttctcagtaaggggatagtgtgatgtgtagtacacaccaattttttattaccaaacttaattaaaaccctcagcgcaagccagtaactatatacataccatactaatggtctaagtcgcgatgtttttgatgtgttgctaacaatattcggaacagtaactactgcataaccgagcttttcaaaataatcagcgtgtaccttgctacagattattgcgtcaacatcagctatttctcgcagtgccgttaaaaatttaatcgagtattgccacattcccgtaccacttttacctaaacgtgataggttaacgatcattgaatagctctccgtttttccattcatgcttgtatagcgattatcacaaggacgaccaatagttattaggaaacattttcattaaaatgaaccacggatcataattaaaaatgaataaggaatcatatccaaataaatataagcaagccttgtaattattataaaatcaccattaaaatcagttcataatactaagccaaatattataccaagtaaaaatgccacaaaaaatagcatctgccataatatactcactctatggtaaacactaagatatgcaagagcatagtaagcaaaagaaagaaaactagggtttccgacaatctctaattgccacaagtcttaattttgaaattgataaatagtcaaaaacaaccccgtccatacatattatagatacatatatagcatctgttactgtatccgaaaaagcaagagtatttaaaggttctaattaaggaaattgcaaataaatcatcctacaaaacacgtataaactatacgctaaatagtcacgacaataatagcataagcattttttatactataaactcgatttgtattgatgttgatactatgaaaatattttttttattaccatttttgctaattttatttttttagtgtagctagccagccctttaagacgaaatattaaattggtggctattttcggatatcccaacttcttataaaatgatgcaagttcagccctatcggtggaatcaccataacatgccatagctaaagaagtataaaaccaaggacgctcttttgtaagaacccgtccaaatgagatatatatttttgtattgttattataaaaatcctccctcagttttaaataaccgatgaaatcaatttttattcgacgagccttcccattactttcgaatgtatcgttatctcctctgcaatcaaccagtggcagtgatatgtactgcagggtcgaattcatattgttaattattcttaataaaatatatacatgcgcataagctgtaccaatgtatgactcgtcaaatatgacgtcagaccatttattccttttcactataatagagcttaagtagctaaaaagtccgccgactgagttacatttactaaagtactctatcaaatcagcttcattgctaaaagaaaataatctactgccaccatttaaccatcgccgatgtggattagatattttcgtcattgaaatatctaattctcgtctgtcacataaataaatgtcacttccggcagccaatttatcttccatcaatgcaagggaattttttgtaagaatatcatcacttccgaaaatccaacaataatctccagtccccatattaactgcagataaataattcctatctggcccaatattttcgttatgcctttgatacaaaattggaaaattaaatctatctctccagatatttattgactcttccgttccatcagttgatgcattatctgaaatacatacttctacaattaaggagtgagaagattgattattaatactttcaagaaggtcttcaatgaattttactcgattatacgttgggatacaaaatgataccttcatattatgctagccttttactcttatacatataatacactggcaatccccaaaaaacagttagcgagaacgataaaattagtccgtataaaataccaactattccataatgctctgcaaaataccattgagtcacaccaccaattaatgcctgacacggaactatgagccaaagaatttttaattggttcatactttgaagtaacatagcaaatgtatcacaccaaactcttatactaaaatacacagccagtaaaacaaaaacagccccactaatattataatctataccgttagcaattatgctatagatataatcctttaaaacataaatgaataacgtaccaagaccaacaaaaaataccccaccaataatatttaggaaaatgattctatgcaactttctccactgcattttcactcgtaattcagcacatactggccataatgcttgtaataccgcagtataaataaaaaacattaaaccaaatattttcatcgttacagtatattttataatatctgcagcagataatttctgagacatcacaatataatcagtttgtaaaactattatcgataaggacgaaaaaatcagaaaccctgatgaacgtgatagtaataatttataggtgttaaagtttactttcgttttaagaacatatatgtaccgaaacgatatatatataatgggcagtattgctaccggagcatacaatgctactaaagcgaaggtaatactcgaatctggcattaaataatggatcgcaactacatctaaaaaacctaaaagataagataatgcattaattatattagctttccaccctaacagttccgcaaataatattttatagaccacactcccaacgccaatgaatataaataatatacttgctataaaaaaataacttcctgagttgtttttcaattcatcgctaaatgaagtaagatatagtgacgataatttatctgataagaagaataatgtagagcttaaaatgattaaggatgcgaatagaatatgaattgcggccttgatatatgcatcatatgattttctatcagctttcaactcagatatataattttgtagactactaccaatcccaatatctgcaatgctaaaccagaccaataatccagttaaaagagtaaatacagcgtatgattcttcgccaagaatttccaaaagaaatttaacacttactaactgaacaccggcaattattatctttgaaagccaagaggaagcggcaataataagatgtcttggaattctaaccaacctcagtttcctcacgtcagcttcatcttttaattataaaaaatatttcattctttaattatgcccgctttcgcgggcagaaacatcatatagaactagtccaatcatacattttctggacaccatcttttgccgagactttcgggctccagtcaattgcattagtgatttttttaatatctgcaacaaaaacacgctgatcactttcccttactggtaaattagtgaacctcatatcaatgttgcaataatcttcaagcaatttgaataattcaagtaatgataggctgttgacaatggtaccaccaatattaaaagcgttccccctaatttttgatacatttgccaaggcagtgaaatataacgaaatcatatcttcagcatgcaaaacatccctaacttgcttaccattaccagaaatagtgaagggtttgttaataccatttttaatttcaaccgctttttgacaaaaccaacctacccagccttgatcataagtagcaaactgtctcccaccatacattgatgaatgcctgaacaccactgtattcaaaccaaaaatccttgcataatcaagcatgtattgatctgcagcaccttttgaacaaccatatggtgagtggaaatctaattgtgtgctctcatcatatccattaggcttatctatacaagtatatctagtttctgtttcattgtatttatattgctcaagatcgccgtatactttatttgttgatgaataaattatattacaatttgaattatactgccgtactgcctcaagtaaatttaaagttccacctacattaatttcaaaatccatacaaggattgtcaatagatgtagtcattgccacttgacctgcaagatgaaaacagctatcaggcatatacttagttattaatcttgtaacatcatttttgttgcgaatatcaccatgtacaaactcaaagtttcctaaggaggataaccaatgtaaattatctgttgcacctttacgtgatagattatcgaatacaattaaatcaatcccttgacttaaagcaaaggaggcaagattactcccaagaaagccacatccaccggtaattaaaagcttcatttcccttcctcttcaattatttcagttaatgcatcaacaagagagaactctcttttccatcctattttttcaagttctgctatatcagcacaactatacatcaattcattggctctttctttgaccacaccaaattcaattatagaattgctttttgtgatatttttaacagtctctacatattcacgaattgatatagcctttccactaccaacttcaatactatgaaatttggggaaattattaacattatttataatacaatcgaacgctgttagtagatcttttatatacaagaaatctctctgttgcaaaccagatgttaactttactggctggttacttaaacaacgtctaataaccatactggtaaacttatcgtctccatcaaaagctccatagaaatgctccaattttaactctatatatttaccacaaactttatctataatggcggcggcgagttcatttgctttttgtttagtatatgcatataaactcgtatttggtggcagtgatgttccacaatttatgaatactgcatcaagtgatgagatagattctaatactctgataggcataagaatattgctttctattaaagctgttgcaggttcgttatgtcttccatagcaagcaatagtgttaataataatattcggttcaaattctactattttttcgatccaattattttctgtcgtgtaaataatattatttatggtagcttcattgttcctcttccttgctaagccaatcacagtatgtcgactttcgaagtaggatgtaagtcgtgatccaaggaacccaaacgctcccattattagaattttcatgaaatcatagaggggaatccccccccctcaaaaattagaaatttaaaccaaaaaactcttcaaatttgctaactacataatctaaatgctctgtagtcaagccaggataaataccaatccagaacgtttgattcattatacggtcggtatttgtcaactcacccactacacgatatttcacattagcaaaatacggttggcgaatcagatttccagcaaacagtaaacgtgtaccgatttttgcttcatcaaggaatttcaccagttcgacacggttaacaccgctagtttctttcagggtgatagggaagccaaaccaggatgggtctgatttctctgttgcttctggtaattcgaggaattcagtgcaagattgcaagccctgtttcagataggaaaagttagctttacgctgctctacaaactcttctacgcgctccaactgagccagaccacatgctgcctgcatgtccgtgattttgagattatatccgaggtgggaataagtatatttgtgatcatagccttgaggaagtgatcccaattgctgaccaaaacgtttaccgcaggtgttatcgcatcctggcgcacaataacaatcccggccccagtcacggaacgactcaataattttcttcagttcacctgacttggtgaatacagcaccgccttcacccattgtgatatggtgagccggataaaaactaacggttccgatgtcaccaaaggtacctaccatctggccttcataagtcgtcccaagggcatcacagcagtcttcaatcaaccataagttatatttatcggcaatccgacgaacttcactcaggttaaatgcattaccgagtgtatgagcgatcattatcgcttttgatttctcagtaactgcagcttcaatgagagaggcatcgatattatatgtcgggatatcaacatccacgaataccggtattaaaccattctggatcgccgggttaactgtagtcgggaagccagcagcgacagtaataacctcatcaccaggtttgagagcacgctcgcctaattttggggaagtcagcgcagtcagtgccagcaagtttgccgaagagccagatgtagtcgttaaaacatgaggaaccccaataaattccccaagttttttctcaaaggcatcattgaaacgaccagtagttagccatccatcaagagacgcctcaaccatcaattgtaactctttggcaccaataaccttcccggaaggaggcacaacgcttgtacctgcaacaaaaggtttcgggctcaatgcctcattcgcatactgagcgacaagctgagagatttgctcacgcaggttatttgctgtcattactttgattccttaaacttattttcttaacgagtagttgcagacatatagtcgctgatttcacgctttgaacaaatcaacatatcttcgccgcgaatccatgctttatgccattttacgatgcgaccaagtgtttcagtcaatccccaacgcggatgccatcctaattgcatatttgctttagagcaatccagtttcaggtaatgtgcctcatgaggatgattctcaccatccagtaaccagcttgcatcatcaccccaaagcgtgaccatcttgtcaacaataaattcgaccgtcttcgcatcttcatcacgcgggccgaaattccatccttcagaaaacttagcaccttctgtatataagcgttgcgccaccacaatgtaaccagaaagaggctccagtacatgctgccagggacggatagaatatgggtttcgaataataacctgctggttattttcaaatgagcgcagaatatcgggaattaaacggtctttagcccaatcgcctccgcctatgacattaccagccctcacagacgccaaaccaacgccatgttgctcataatttgcaggattgaagaatgagttccggaatgcagacgcgactaattctgcacaacctttactattagagtatggatcgtaccctcccatgggttcgttctcacgatagccccacacccactcacgattgtcgtagcacttatcactggtgatatttacgactgcctttatgttacctacttgcttaactgcttcaagcaaatggacagtacccataacatttgttgagtatgtttcgattggctgttcataagataggcgcactaaaggctgggctgccatatggaaaacaatttctggcttaaattctgcaatagaattgcgcagcttttcaaaatcacgaatgtcgccaatatgagattccataagatcactaagacgcactatctcaaataaacttggaacagttggcgcatcaagtgcatagccttttacaattgcacccatttcagtcagccatagcgaaagccagcttcctttaaagccagtatggccggtaacgaatacacgtttaccttgccaaaaatttttatcaatcatctacttactcccaggttttccacggagctttacctttttcccacagcccttcaaggtaaactttatcacgtagggtatccatcggctgccagaaacctgggtgttcaaaagccattaactccccctgttgtgccaatgtcattaatggctcttgttcccaggttgttgcatcgttatcgatgagatcgataaccgatggattcaacacaaagaaaccaccattgatcattgccccatcgcctttcggtttttcctggaatgaccggacctgaccagcttggatatctaatgcgccaaaacgtcctggtggaaaagtagctgttaaagtcgctttcttaccgtgagccttatggaaatcgatagtcgctttgatatcaaggtcggcaacgccatcaccataagtaaacaggaaagcctcgtcatcttttacgtattcagcaacacgtttcagacgaccaccagtcattgaagaatcacccgtatcaaccaatgtgacattccatggttcaacacgtttatggtgaacttccatacgattttcagccatatggaatgttacatctgacatgtgaaggaagtagttcgcaaaatattctttaatcacatatcctttataaccacagcagataataaaatccttgataccatgcacagaatacattttcataatgtgccaaagaataggcttgccaccaatttctaccatcggttttggttttacaattgtttcttcacttagtctggtaccaagtccaccagccaggatgaccgctttcataaattatcctcaatattatttagatgcggtaaatgcatcagaatagaaatgttctacagagagatttttcatcataaagtcctttttactggcatcgatcatcacaggtgaaccacatgcatatatatcgaagaactctagagaatcaaaatcatccatcacagcatgatggacaaatccctttcttcccccccattcggcgtcatcaccagaaacaacagggatataatgaacgttgtcgtgctgttcactccactgctgcggtaatgcagagtaaaaatctttactatcttgcattccccagtagatgtagatctcacgacgacattttccctgaatgagatgctcaaccattgatttaactggagcgaatccagtaccgcctgcaaggaagattataggtctgtcactttcacgaataaaaaatgttccgcaaggtccttcaatgcgcataagagtattttcttgtaactccccaaaaatgagagagctcatctgaccattgggaacattccttacatgcaactcaataccattcgactcatcactattagcgatagaataactgcgagttacacctttataatgtaaattgatatactgccctggaaggaagccaatttttgctgttggtggtgtgcgtaacttcaaagtcataacatcgcctgaaaccagtacagcactatttaccttgcatgggacaattttttttgtctgtccagctagttcaggaaaaaaatgcgcatttagctcaagggcggttttaggtttacagcagcaggttagtattttatcaccctgtccaaaaatattacctttggagtcaacaacttctcccgccaacaaatcggactcacagataccacaatcacccgctttgcagctatgttcaagatggatgccagccgatagcgcagcatcgaggattgattcatcctctctaccggaaaattcaatatttgatggaaaaatcttaataatatgagacacgatgcttactctgttaacaaggcttgatgcagtaaaggtgctgcagcatcttttgctgaaagctcaggcagctgagaaaaaggccattcaatacctattgtctcatcattccataaaatgctaccttccgatgaaggtgagtaataattagttgctttgtacagaaactctgcatactcactaagagtaacaaaaccatgagcaaaaccttctggaatccaaagctgtcgcttattctcagcagatagatttacgccaacccattgaccaaaagtaggcgattcttttcggatatcgaccgcaacatcaaaaacctcaccgacagcacaacgaactaacttcccctgtgcattttctcctctctgaaaatgtagccctctgagtacgttctttttggattttgaatgattatcttgaacaaatgtaactttacgtccaatcaactcttcaaaggtctgctggttataactttcaaaaaagaatcccctctcatcgccaaaaactttaggctctaagatcaagacatctggtattgctgttttaatcacaatcatcacttataaacctttcaccatcttcagcaaatatttgccataatcattttttgataatggcccggccagttctataacctgttgtgcatttataaaatttttacgaaatgcgatctcttccgggcaggacacttttagcccctggcgttcttcgatggttgcaataaaattactggcctctatcaaactctgatgcgtccctgtatccagccaggcataaccgcgccccatcatggcgacagacaatcttccctgatccatatagatacggttaatatccgtgatttctaactcaccgcgagcggaaggcttaagatttttcgccatctccaccacgctattatcataaaaatacagccccgttaccgcgtaattactcttcggttgtaacggtttttcctccagactaacggctgtgccactttggtcaaactcaaccacaccgtagcgctccggatcgtttacatgataagcaaagacggtagcaccactttctttattaacggcagcttccattaactttggtaaatcatgaccatagaagatattgtcacccagtactaatgcacaatcatcattaccaatgaactcttcaccaataataaacgcctgtgctaagccatccgggcttggctgtactttatattgaagattcagcccccactggctgccgtctcccagcagttgttgaaaacgcggcgtgtcctgtggcgtactgatgatcaggatatcccgaatgcctgccagcataagcgtggaaaggggatagtaaatcatcggtttatcataaattggtagcaattgcttacttaccgccatggtcaccggataaagacgggtgccggagccccccgctaaaataatgcccttacgcgttttcatttccatttctcattcatagaaaatgccctgatgggcatttaaatttatcagatggttgtcgtcgtaaacatttcagtcagcatgcgcttaactcctaattcccattgcggcagaataaggtcaaaattacgctgaaacttttcagtattgagacgcgaattgcctggtctgctcgccggcgtcgggtaggcgctggtcggcacagcattaagctcagtcagcgcaagcgttatccctgctttgcgcgcctcgtcaaagactaaggccgcgtagtcatgccaggttgtggttcccccggcaaccagatggtaaagacctgcgacttctggtttctttaacgccacacggatcgcatgagccgtgcagtcagccagtaattctgcaccggttggcgcaccgtactgatcgttgatgactgaaagtgtctgacgctctttcgccagacgaagcattgtctttgcgaaattattgcccttacctgcataaacccaactggtgcggaagataagatgcttagggcagttatcctgcagggccttttctcccgccagtttggtcttgccatagacattcagcggcgacgtagcgtccgtttcctgccatgggatatcgccggtaccaggaaatacataatcggttgaataatgcactacccatgcgccagtttcgttggctgctttagcgatggcttccacactggtggcgttaagtaactgcgccagttctggttcagactctgctttatctactgcagtatgtgctgctgcgttaacaatcacatcgggacgaagcttacgaacggtttcggcaacgcctttcggattactaaaatcaccgcaaaactcttttgaatggacatccagggcaatcagattccctactggtgccagagaacgttgcaactcccagcctacttgccctgtcttaccaaaaagtaagatattcattactggcgtccttcatagttctgttctatccaactctgatacgccccacttttaacattgtttacccattgagtatttgcaaggtaccattccactgttttacgaataccgctttcaaaggtctccagcggtttccagcctaattcgcggctaattttacctgcatcaatggcataacgacgatcatggcccggacgatccgcgacataagtgatttgttcacgataagaagtcgctttgggtacaatctcgtccagcagatcacagatggtaaataccacatcgagatttttcttctcattgtggccaccaatgttataagtctcccccgccttgccttcagtcactaccatatgaagcgcgcgagcatgatcttctacatatagccaatcgcgaatctgatcccctttgccataaattggcaaaggctttccttccagtgcgttcaaaatgaccaacggaatcagtttttcagggaagtgataagggccatagttattagaacaattggtaacgatcgttggtagaccataggtacgccgccaggcacggactaaatgatcgctggatgcttttgacgcagaataggggctacttggcgcatatgccgtcgtttcagtaaataacggcagcgtaacgctgttttcaacttcatcaggatgcggtaaatcgccgtaaacttcatcagtggaaatatgatgaaaacgaaaattattttttttatcttcgccaagcgcagaccagtatttacgcgcaacttcaagaagtacataggtgccgacgatattggtttcaataaatgctgctggcccggtaatcgaacggtccacatgactttccgcagccaaatgcatcaccgcgtccggctggtactgctcaaaaatacgcgttatttcagcggaatcacaaatatccgcgtgttcaaaattgtagcgattactctcagaaatatcagaaagggattcaagattaccggcgtaggttaatttatcaatattaactacagtgtcctgtgtattcttaataatatggcggacaacagctgatccaataaaacctgccccgccagtaataagtatcttcacttttctattccataaggcgtatttaatgtggtatttaatttgccaataaaaattaattgctcaagtcgttacacacgctaccgcccctggctcatcagctaccagtgcactgcgtacatatcgacttgttacaaacctcgcccagcagggcaaagctcactaaaacttaaacgctaattgtcttattaattgcatccggaaacaaggattaatcttataaaatcagcattaaaatgctccagataaccccttgttacttaagccctttatacaaaactaaaacggcagtcaacactcgcttcagccaacttgccgcttcgaatgttcactgccgttattatgtttatcaccaaccatttatcacggttgttaatacttattcatgcaaaagctgctctatgctcttacggaacttcgctccttctttcaggttgcgcagcccgtacttcacaaatgcctgcatgtagcccatttttttaccgcagtcatagctgtcacccgtcattagcatcgcgtcaaccgactgttttttcgccagttctgcaatggcatcggtgagctggatacggccccaggcgcccggttcggttctttccagttccgcccagatgtcggctgaaagcacataacggcctaccgccatcaaatcggaatccagcgtctgcggctgatccggtttttcgataaactccacaatccggctgactttgccttcattatccagaggttctttcgtctggataacggaatactccgataaatcacctttcatgcgcttcgccagcacctggctgcgacccgtttcattgaaacgcgccaccatcgccgcaaggttatagcgcagcggatcggcggtagcatcatcgataataatatccgggagtaccacaatgaaagggttatcgcccacgaccggacgcgcgcacagaatagagtgccccagccctaacggctgcgcctggcgaacgttcataatcgtcacgcccggtgggcagatagattgcacttccgccaaaagctggcgcttaacgcgctgctcaagaagtgattcaagttcataagaggtgtcgaagtggttctcaacggcgtttttagacgcgtgagtcaccagtacgatttctttgatccctgcagccacaatctcatcgacaatgtactgaatcattggcttgtcgacgatcggtagcatctcttttgggattgccttggtggcaggcaacatatgcatacccaaacccgctaccggtataactgctttcaaattcatcattgtttcttccacctgtaaaatggttgctgaattatagctctttagcttgttttcgccagcatgaattactctgctgccagggataatgatggcacgctttacattacgtcttagtcggcaccataacattaagtatgaacaactttttcccaggaattttcgtaaaaatagcggtacttaccctccccgcttcggcagcgaaaaattcactgcttcgacattcacggtttggtgattaatcctgtcgatatccacggaactctgcccgttttcattgatggcatgaacattagcgagggaaagcagcgtgtcctggcgggccataaattgaccacggacatctttacgcaaatcgaaatgcatttttaacgccgggccaatcgctgaagtttgcatcacgttgatattacgcagaaagaggtgctgcggttgattatgcagttccagcgtagcacgcgtcatccgtacattggtgatggcgacaaaagaggggatgttgccggaggaaatttgaatgccgcgtaatttataagcaacctggcgattatccaaccgaatagcgtttaatttaaagttttgcggaattgacaggtattttcctttaacgacgccatagccgatgagcatcccagcactattcgtcatatcaatattatcaatgacgaaattatcacagccataaatggcgatcgttgcgttatcaatacccgcatttttactgaaatcgggcgtgatgtttttggctttgacattgcgaatgacgaaatgtttgccattttctacgtgcaccagctgtcggcaatcagatccggtaatattggccaccacaaagttttttactgcctgatcttcaggataactgttgtcataggtgctacccgccagcccgatgccgatcccccagttgattttgccattggtacaatcaatgcgttcgatgacatgatcggaaatcaggatgtcgcggtcgtgaatcgcgacattccactcaatggcgtccccctgcaaatcgctaaagcggctatgcgtaatccgcgcgccgtccatttggttatgaaatccctggcggagaatggcgtagttggcgtgggtaacggtgatgtcatcgataatgagattacgcatcacctgcggttccttaccgccgatgaaaatttgcgcgacggggccaaagccgctcatcgtcacgcctttaatcacacagtccgacccgcgaacatccagcgtcacattgtgcagactgccgccctgctcccccaccacctgacacccgtcctgcaaaataaaccgtccccggccattcccacgcaccgcgccctgtacccgcagcgtttttcccgccggaatcgttatcgccgcattgatattttcacacacccatcctggcggtaagaccacggtctgtccgtcggcgaaggcctgtttgaacgaggcgataccgtcatccgccggataatccttaatatcgacggtctcgcgaggttcacgcgcctgtaccggcaaggcgcgcagaaaaggaagaacagcaagcgcggaacctgccgtcaggagggtacgtcgggagaacttattcacgggcataccacctcgtttatatcgtttgtagcaggctggctagctggcgattaatcgcctgctgattaaaatcttgcgccactttttcacgggcgcgcgtgatcaccgactccagcgtgtcgtggtcaatccggctgaactcagcgagtcgggccgccagcgcctgcgcatcgttttccggcaccagccagccggatttgccggcctccaccagttccggaataccgctatgcacggtagataccacgggaatccctaccgccatcgcctccatcagcgctaccggaataccttccatatcgccatccgtaccggtaatcgacggcagcaaaaaaacatcggcgtcatccagcatcgccttcacttcatggctcggtttaaaccccggcatctcaatgacatcctctagctgatactgctcgatgagcgtgcgcagccgacgttcccacgggccaatgcccagaatgcggtagcgaaacgccacgccctgcgctttcagttgccgacaggcttcaatcgccacatgcaggccttttttctcagtcaggcgcgcgacggaaatcatctccagcggcatccctggcgctttcaccggacgataggtaaaacgcgtcatgtcgacgcccatgcgcgaaacggcaatcttttccggcggacagcccatacttttcaggcgaccggcccacagttcgctgatgggcagcatcagatcgccacgacgaaacaactgctgatactccggcgtgtaatgactgagcacttcgcggctggaaatatcaatcccgtggaaaatagtcgcgattttgccgcgaagcacgcccagttcgcgtagtttggccgccgtcacgcccgccggaccaaagtgtgcgatgaacacatccgccccaaaaggctggctcacctgcgcgcaaatcgcggaaaggatcaaattgcgtgattcatcgccatagcgggtaaaattgagcgctttccaggtcgccgcccgatgcagccccggcagcgttttacatgcccggtagcgcagtttcgccagccgtccctggggctcatcctgtaaccagcgggttttcgccgccaggccatacttctcccaggcggcgtgagtatgttgggtatcgcctttttgtaacgcgacaatctccacctcatggcccatatcaataaacgcagtaatctgattcagcacaaaggtttccgatgagagtggaaatttcagcagaaaaaagctgactttcattgcgcctcccgaattctgtcgagaacagatttgatcatcgtgaaccctttcgcccgctcctcggtgacggcgttagccacttttgcctttagcgcaggcaattgattgagcgtatcggccaccacgctttgtaatgaaccgttcagcaagtgacggatatcgatggccaattccgccaggcctagctgctgcataatcccggcggatttatgttcataattaatggcgatggcgggtgtgccaaaattcatggagataatggcggaatgcaggcgcgtcccgatggtcagtacgcaggaggcgaggatctttccgatttccacgtcattgagttcgtccatcgcgatatggaaattctctgagtcgtttacatacttcgccatccgtaacgcaaccatccggtcatcgcggttatagcgatcgatactggtgcaggttgacagcgccagtacctgataaccgtccgcaatcaggcgattcacgacctgggcaaatgcctgctcataggcctgctgagtggtgcccaggcgtttatcaaacggctccagatcgcgcaacgtaatcgcgacggttttgcggcgcgcggtgacgtccagccagtgctgcacagcataactggcaacaaactcgtcgtgacggcgttcgactaaccaggcggtatccaccccctgctccactttccgggtatcgatctgcgcggcggtcatcatatcgcggctgacggtttcacgcaggatcagcgcactggtgcggccaaaaacataattggcgagctggttaaagtcaggattctggaaagggccgacgctatgtcccaccatataaattggtttgttcgccataaacgcgcacagcggatattcaaagtgagtcaaaccgtataagtcgacatagtttgaaccgcccacctgaatgacggcgtcatactgcgcaataaattgcgcgaattcggcaaattccggcgcgatagcaaaattacgcagcgatccttcctgggcgactttagacaataaaattttatgctgaaaacgacggcgtaatacttttttcacccgaccgttaagccctgccgccgcctgctgtttctggcttaactgatacagcgggtcggcaataatcgggcgcccctgcaaccaggcggaactcaccgggaaacggctcatcacatccatctccgcctccggcgcctgttgacggatggcatcaagcaaaccgcgcataatggcgctatcaccacggttgccgcatgtgtggttgcctaaaattaataatttcataaatagcctcttatatccccgtcatccgacacgtaataactttttcatttttgcactgccaacaagctgatttttaatttccatcaccagcgcattgcgtgaaaaaataatcatcaaaataaaactcaaaataccgaccataacctgtagtgcgaatacccctgacaacggtaaatagccgtcggccagctttcctgcgccgtagctggtaataaatgttggcaatgagagataaaacggtagccacaggctgagaatatactgacgatagctggagccgagtaccggcttaatcatcacgaaatagctcagaatggtgttgatgatttgcaccaccaggaaccccagcgtcacgccaatcgcccccgccagatggccgccaatgagaattgccgggataaacagaaacgttttaaagacgttgaacttaaagctgatatccacgcgcgctttcgccatcagcagcgaaccaatcgggttgccgaccgagcgcaacagccccaccacgcacagcaattgcaggatcgggataatactgttccacttctcgccaaacactaacggcacaaaattgttcgccactaccatcaggcccaacagcgcgggaaaattgataattcccaccacggaaagcaacttatagaagttgacgcgcagcttctcggtatcgtcctggattttggcgaatgccggaaatagcacgcgagtaatgatggggttaagcttcgccggcggcacaaccgccacgttgtacgcgaggttatatcccccggcgacgcttgcgccgagaattctcgccagtaccagcgtcgataaattcgtgttgatgtaattgacgatactgtccgccgtcagccacgcgccaaaacgcaggttcgtggacaccgatgccagcgaaaaatgcagccccggacggtaaatcttgcggccaaagtaaccaaacagcagcgttcgcaccgcactgttcaccagatagccgagaatcgcggttaacgccagcggccagtaatgggcgctaatcaccgtaaaggtgaaccccgccagcacggaggtcgtttcgatcatgccgatcttattgaactccagctctttttgcatcagagcgcggaactgctgcccgtgagggatcacgatgaacgccagcgacaacgttttgattaacggcgcgagatccgggttatgcaaaacatgggcaatcgcatcgctcagccaaaagaccaccgcaaataccacaatcccaagcccaacgtttagccagtagagcgtggtcagctccagatgcccaatcgttttacgctggataatcgagttcgcgatgccaaagtccgagatcgtgtcggccagcgcgataatcaccagcgagacggtcaacaggccaaactggtggttgtcgatgatccgcgccagcaccgtcatctgaattaaccccagaccgataatcactatcgtggcgatagccgaccatttagcgccgctgatcgttttttgtcgtaaactcattcttttctccagaacctgttcacaaggcgtcattggcgcagccagattgagcactgccctggtgcaatatggcaagtaaaatagccttgtgggtcaggttcttaatacgccgctttattaacaaaccctttaaaaatcgtcagaaaaacgattttgatatcgaaccaaatactccattcgcggatgtattccaggtcgaattccacgcgtttttccattttctccagcgtatcggtctcaccgcgccagccattaatttgcgcccagccggtgatgcccggcttcatcttgtggcgtagcatgtaaccttcaatcaactgacgatactgttcgttatgcgccaccgcgtgcgggcgaggaccgacgatggacatcccgccagttaatacgttgataaactgcggcaattcatccagcgaggtacgacgcaaaaagttacctacccgggtgacgcgcggatcgttttgcgtcgcctgggtaacgaccttatcgttctccatcaccttcattgagcggaacttccagaccttgatcggcttgccgtccatcccgtagcgcgtctgacggaaaatcaccggcccgggcgagctcaatttgaccgccagcgcaatgcagcacagtaccggtgagatgagcagcagaatcagcgacgccagcacgatatcttctgcccgtttaagcagacggttaatccctgatagcggcgtgtcatacagcggaacgaccggaacgccgctcatctcctccacgcgcgagtggagaatattaaaggtgaacacatcgggaataaggatcaccgagcaggtggtgtcggccagctcgcgcaccagttttttcaccatggcgccgtcgctcatcgacatggcgatataaacattgtgaattcgcgaggctttcgcatcgtcaattaactgctcgaagttcccggcccagtcagcagagacgccgcccggtttaggatcgtgatagacgcccaccacctcaaaacccagccacggctcattacggaagctatccagcaacgcctgacccgcaggcaaatctccggcgacggcgacccggcgagtgttataaccacgattgcgtagccagcccgcgccgaaacgaataaatgaacggcataacactaagcccaggctggacagcgcataccaagccagccaggtggcgaggcggttgtcaaagtcatcattaaacgccaccagaccggcgctgaagatcaggctcagcgtccagttttgcagtaacagcgttaactctgtcgacattttgacgccgcgccaggagcgataaaaatcggtcatcccgcccagcatttgaaaaacaaccagcgtaatcagcgccaccaacaggtgcatgtacaggaatggcagtccactgacttcacagatgaaccacagcccgccaaacatgatggtgatatctgaaaagcgttgcaccatagagattaacgatgcattggttttggctcgttcgcgcttttttagatttgtcatcgttgttcctgtgtttggccccttacccgcaggcggtaaggggagatctgacgttactgattcagcagcgccagcagagtgcgtgttcgcgcttccatcagcggaatatcgccgcgtgattccacattcaggcgcaccaccggttcggtgttcgacgagcgcaggttgaaacgccagtcggcgaacgacatgctgagaccgtccgtgcgatccaccgcctgcgcctcttccgcaaagtgcgcttccacccgcgcaatggccgccgccggctccgccagtctgctgttgatttccccgctcgccgggaacgccgccatccggtcgcgaaccagctcacccagcgactgtctcttcaggcacaccagctccgccaccagcagccacgggatcatcccgctgtcgcagtaggcaaaatcacgaaaatagtgatgcgcgctcatttccccgccataaatggcatcctccgtacgcatccgctccttgataaaggcgtgcccggtttttgacatcaccggcgtcccgcccgccgccgtcaccactgcctccgtgttccaggtcaggcgcgggtcgtggataatcttcgcccccgggtgtttttccagaaacgcttccgccagcagcccgacgatgtagtacccctcgataaactgccctttctcatcgaacaggaagcagcggtcgaagtcgccgtcaaaggcgatgcccatgtccgccccgtgttcaataacggccttgcgggtgtcgtcgcgacactccggcagcaacgggttgggaatgccgttcgggaaggtgccgtccggggtgttgtggattttgatgaactccaccggcgcgcccagcgccttcaggcgcgcttcgatggcgtcaatgaccggccccgccgcgccgttgccggcgttaaacaccagcttcagcggggtgagattgttaacactgatatagccgagcaggtggccgatgtaggcgtcgcgcaggctgatttgtctgtagctgccgcgcgcggcctcgttcaccggcgggaagtcgcccgcttccaccagacgctgaacgtcgcgcagaccggtgtcgccgcttatcgggcgggcgccctcgcgtaccagcttcataccgttgtagtccatcgggttatggctggcggtcacctcaataccgccgtccacgccaaggtggaaggtggcgaagtaaatctcttcggtgccggacataccgatatccagcacgtcaacgcccgcgtcctgtaaccctttcgccagcgccagcttcagcgcctcgctggtcagacgcacgtcgccgcccagcacgatggttttcggttttaaatattcgccgtaggcgcggccaatccgccacgcgatatcttcattgagctcttcgcccagcctgccgcgaatgtcgtaggccttgaaacaggttaattttgtcatgtgcttacccttcttcaggcaacagttagccctgaccgtaaatggccagcatcgttattgttattcattgccggatggcgcgttgcgcttaccgggcataattgcaggcgtcagacccgcccgtaacggtcctcgaaccgcaccacgtcgtcctcttcgagatacgagccggaacgcacttcaattaaatcgagcggtatttttcccggattttccaggcagtgagtcgcccccagcggaatatagatggactcgttttcaccgagcagcttaacctcgccgttgatggtgactctggcggtccccgccaccaccacccagtgctcggcgcggtgatggtgcatctgcaccgacagtccctcccccggcttgacggtaatacgcttcacctgatagcgctcgcccgcgtcgatggagtcgtatttgccccacggacggtaaacctcacggtgcatgtggtgctcatggcgtccgtcggccttgatcttctccaccacctttttcacgtcctgcaccgcgtggcgatcggcaatcagcacggcgtctttggtctgcaccaccaccagatccttcacgccgacggtggtcaccaggccggattcggcgtaaacgtagctgttttccgttttatggctgatgacgtcgccgtggtggacgtttccctccggggtgtgggcgctgatttcccacagcgaggaccacgagccgacatcgctccagcccgcgtccatcggcatcaccaccgcgtccaccgttcgctccatcaccgcgtagtcaatggactcttccggacaggcgaggaaggcctcttcatccacacgaatgaagtcaagatccggatcgacgccgcgcatcgcctgttcacaggcggccagaatatcggggcggaactttttcagctcttccagatagcgtccggcgcggaacagaaacatgccgctgttccagtagtaatcgccgctggcgacgtaggcctgagcggtttccagccccggcttctcaacgaactgcgccacctcaaaagccaccgcatccgtcgcgcccggcacgacatcaccgcgccggatatagccatagccggtttccggcagatccggcacgataccgaaggtcaccagtttgcccgcgtcggcatagggcatggcgccgcgcaccgcgtcgcggaaggcctcttcattggcgattgcatgatccgccgccagtaccagcatcagcggatcgcagtccgtatgctggcgcgtcgccgccagcgccgccagcgcaatcgccggcgcggtattgcgcccggcgggctcaagaataatgttctccgtcagcttattgagctggcggagctgttcggcaacgataaaacggtgctgttcgttacagatcaccaccgggctttcgcactccacgccgttcagacggcaaatggtggtttgcagcatggtgagatcgcctttcaggcacagaaactgttttggataaagcacgcgagaaagcggccacaatcggctaccggagccaccggccatcacaaccgggtaaagttttgtctgacgcattatcatccccgaatatctgcaataaattggcgtagcacgttctctttattgagagtgcgttcggcgtattcacgtgccgtcgtgttgtttttcggcatggcgagcgcctggctaatcccgttgaccagcgcgtcggtcgactccggttccacgcaaacggcgatgcccggatagcgcgcgcaaagttgtcctaattcggtgtgcggctcagcggtaatcaccgcattaccgccgaccgccagaatgttagtcagcttggagggcagtaccgcatccgccgcgccgcgcttttgcaccaccagatggcagtcgcccattttcagcagcgcgggtaaggcgtcgtaaggctgcagcgggaggaatttaatatttgccaggccgcgttcgcgggccatgttctccagccgcgccttgccgcccccctggccgacaatcgcaaaaatcaacggtcgatcgcgtaatcgttccgcggcgtcaatcaccttttccagcccttgcttttcgccgatattgccggaataaagcacaatttttttgccctctggcaagccaagctgctgacgcaaagccgtcacgtcagcgtcattaacgtcctgaaagcgcgccacttccgaccagttcggaaaaaagaggattttttccgccgcgacgcccttttcccgcgctttattcatcatggagcgagagatggtcgaaacattatcaacgttacgcagcgcgctgcgttcaaaggccgtcgctaaccgcgctacgctgccgcgcttgccttttcccgccattcctaagccgagcatggcatccacttcgtaatcctgaatatgcagaacggtacgcgcgccggagagtgtcgccagcaggcgcattcccggcgtacaaaagagcgtcggtacaacgccgataatccgatccggcttccagcgacgctgcgccatcagtgggaaaaaactgctcaatgcaaagctccccagatgaagcagtcgttttaaggtggagggctgtttcggcacatacagcgggcagcgccagacggtagcctcgccctcttcccggcgatagcgccaggcggaatagcgctcaccgaccttccactgcgggtagtacggcggcgcagtaatgacccgcacctcatggccttcctgcgccatccacgccaccatttcgccggtatatttgccgataccggtcagttccggcgaatagttaatgccatagaccaggatcttcataggcccaccgccggcgcgtcaggaaggaagtaggcccgactgttctcatgaacattgtcgcttgccagaagctgttccggcgtcagccagcggtaactgccatgctgggcatcaggcaggcgtaaatcgctctccgtcacgcgcagacgaaagccgagcacgatgtagtgagttgaaaaatcctcaccggaaaagttgtcgtcatagaagtgctgccagacgccataaaacgtccctgccgccagcggcagacgcacgcccagttccgcctgcgtcaggcgtgcaaaggcggcctccagcgtttcgtctttgcacacccgcccccccggcacaaaccagtagccctgcgccggacggttgagacgctggcccagtaaaatttccccctggccgttttccacgatgaaatcgagggagatgaggggcgtggtccgcaccacggcggcgaaatcttcctgacgtaaaaacattgtcacccccggaaccggtgctgattctcaaggaaccactggtaagtaccggcaagccctgcctccagtgaaatttcgtgataccagccaagctgatgcaggcgcgtgacgtcgagcaatttacgcggcgtgccgtccggcttcgtggcgtcgaacaccacccggccctggtaacccaccacctttgcgatagtctgcgccagctcgcggatggtgcagtccacgccagtgccgacgttaatgtgcgacagcatcggagcggtgttctcctgccacacttcgcgcgccagctccatcacgtgaatgctggccgccgccatatcgtcaacgtgcagaaattcgcgcatcggcgtgccgctgccccacaccaccacctccggcgcgtggctctgcgcggcctcatgaaagcggcgcagcagcgccgggatcacatgtgaattgtccggatggaaattgtcatgcgggccgtacaggttggttggcatcaccgaacggtagtcgcgaccgtactgccggttgtaggactcgcacaatttaatcccggcgatcttggcgatggcatacggctcgttggtcggctccagcgtcccctgcagcagctcgctttccgccatcggctgccttgccagtttcggatagatacaggacgaaccgagaaacagcagtttgttcacgttgtgcaggtgcgcggcgtgaataatgttgctctctatcatcatgttttcatagataaaatccgccggatatgtgttgttggcgacaatgccgcccactttcgccgccgccagataaacctggtcgatacccgccccggcaaagaacgcctgtaccgcgcgcccgtcgagcagatccagctcatcgcgggtgcgcagcaccagttccacgtcgccgcgcggcgcaagctgccgtacaatggcggagcccaccatcccgcgatggcccgccacaaaaattcgttgcttattcattctcaggactccagcgcgatggccacctcgtaaccgtgagatttcagcagtgagtgttttttcgcggcctccagatcgttcgccaccatctcggagaccatctccgacagggtgatttccggtttccagcccagtttctcatgcgctttggacgggtcgcccagcagggtttccacttccgccggacggaaataacgcggatcaacggccacaatcacatcgcccggtttcacgcccggcgcatcgtgtccggtaacggataccacaatccctttctcattaatgccttcgccttcaaagcgcagttttatccccagttgcgccgccgccagctccacaaactggcgcacggaatactgcacgccggtggcaatcacgaaatcttccggctgctcctgctgtaacatcatccactgcatccgcacgtaatctttcgcatgaccccagtcgcgcagcgagtccatgttgccgagatacaggcaggactccagtccctgggcgatattggcgatggcgcgggtgatcttacgggtgacgaaggtttcgccgcgacgcggggactcgtggttaaacagaatgccgttacaggcgtaaataccgtaggattcacggtagttaacggtgatccagtaggcgtacagtttcgccaccgcatagggggaacgcgggtagaacggcgtggtctctttctgcgggatctcctgcaccagcccgtacagttcagaggtggaggcctggtagaaccgcgttttcttttcaagaccgaggaagcggatcgcctccagcaggcgcagcgtgcccatcgcatccacatcggcggtatattccggcgactcaaacgacaccgccacatggctcatcgcgcccaggttgtagacctcatccggctgcacttcctgtaaaatgcgggtcaggttggaggcgtcggtcaggtcgccataatgcagatgaaatttcgggttgcagctgtgcgggtcctgataaatatggtccacgcgctcggtattaaacgatgacgcgcggcgcttgataccatgcacctcataccctttttccagcagaaattctgccaggtaagacccatcctgtccggttacgccagtaatgagagcgacttttgacattttcatttcctcaaatagtcccgttagggagtaactttctgaacgcgctggcgcgttaccactgcgggattgccccgacaaatcgcatttgccggtaatgatttaaatacgctgctgcgcgcgccgacgacggtgccatgacctatcgtcacgccgggcgcgacaaaaacatcggtcgccagccaacatttttcgccaataacaatcggcgcggcgttaatatcgaaatgggcgctggtataatcatggctaccggtgcacaaataccctttttgtgaaatgaccgcatgtgcgccaatattaatttcacccaacgtatataacacagcgtcgtcgcctacccaggcataatcgccgacggttaatttccacggataggtaatttttactgacggtcgaataaccacattctttccaattttggcgccaaacagacgcagcaaaaaggctcgccagcgatacaatatttgcggcgacccggcgaataatgtcgcctgtaccgcccaccataattgtacttttagcacattagcgccgcggaaccccttcggcaccgtaaagccgctaagatcctgcataataactcccggtgattagactttgttataccgcgcttttgttttacccgtcgttttcagacgtaataaataggataattgcgcccaaaatcctggcacacgtaatatttttcgctgtacattttttgcatcctgacataattccagattattcgaggttgacacgccgcccatcgaaaattcagataccagtccgttaattcgccgaaaaggatagcctgctttataaagacgggccgccagcgcataatctgaagaaacatgatattgcagatcataaggatacttttttaacgctgccgtcgggaaaaatatcgcctgatggctggctggcaaactatggtagatataatacccgggtttagccttccggcgtattttatgcccgccgccgaaatccagcagcgcgtcgccaatatacatcgcctcgcccttttgccgcgccagttggcggacaaacagcgcggcatcatcatggaacgcatcaccggaattaagaaacagggtataacgcccctgcgccagcgcaatgcctttgttcatggcatcataaataccgcgatccttttcactgataaaacgcaggttaaactcaccgtgacgtttttgcagaaattcgcgcgtgccgtcctccgaaccgccatccactacgatccattcaaatgacagacccggatcgcgcgccagattgcgcagcgagcgccaggtttttaccaccccttcgtaattgcgaaaggcgacggtaacgacgcttaaaaacatgccaccaccccgttatgaaatttttaacgccttgcgcaaaatgaacggacagacgattaaaaaagcatattccgggctaaatattgaaccggtaaaaaacagtgacaccggcgtaaaaagatagagctgtacccgaaaattgcgattatcgccaaacgcatttagcgccatttttaaaactttccccatataccacagcgtcattagcactgcgaaccaggaaaaataaataatcagcagatacaatccattgtctatggttttcccgacatccgcaccgttaaagattccgaatgatgcgacatattcataaagtgagccaaatctgactacaccatcaatatgggtcaaggaatatccgaccatgactaaggggcccacaatacgataataagaagatgagccttccgtccctaaatcgccaagtcgtgtcgcgatataaggaaatgcaataattaccccaaccaaaaacagggttaatgagaccagcgccagtggaagttttttctttatcgcatccttattcaaatattggaacgcccactccagaaggtaaaacaggataaaggtcattacccctgaaaatgatcctgataatattatccctgccagaatcatagcatcgcttttcggtgttttgataccaaactgtttgatgctcagccaaattgagattagtgccaaagcgaaaaatgccggttcaaaataaagcgcagtggtacgcttaccgccaaattttatgaagttcagtacgtagctattactgtaaatgagatatttcgaaattccttccataatactgctgccgccggtaaggataatttgcgccatctcaaccgcggcgagcgcgaccactatacccaccaccagataaaaaaaacgcaaaatctttcggtggttatgcgcggaaatggttttgaatcggatactccagaccatcccgataatgaccacaatatagacaaacagcatcgtggatgtgacatatttaccggcattcagcgactggccgaacaggaagttaaatgccgtaagccccgcgccgatgcctaaggcgatcatcaatttttttacgctaatgcgttccacaaataacagcagcaacagcggtaaaaaagtgacgatggtaatgggaaagctttcccccagttgggcaatcttgacattgaccagtaggtagatcagcggcagcagcagatagctacagattctgatagaacgagacatactcctccagcatctgttgaccgctgtacgcgacgcggctacgcatacgaaaggcgtccagcgtggcgccaaataccgcctgagcaatctctggcttacgccgctgcgccaggcgcagtacatctgtagcggcaaaggtctggccgccggatttcgccagcacctcctgcgccgcctcgctgtgggtagcgagcaccggtacgccgatcgagagcgcttcacacaagatcagcggatagttatcgacccgcgagctaaagaccagcgcatccatctcattgagcgcgctcattaatttgcgcttatcggtttcaaaaccgtgattaacaacgttttggccggtaaaaggcgaaaatttaccgaaggtatgcagttcaattttttcgcccagcgccatcatgtcgtgtaccagacgctggtcagttttgccgtcgtaacgcaagtcatgcgccacaatggcgatccgcggtttgcccggattcagcggcacaggtgatagttgcgcgagaatcgcctcggtcgccagatcgataccgttgttaatcacccggcagagtcccgcgccataaacgctgttaaaggcctcggccacatgctggctcggcgaaataaactggcagcccagccgcagcatgtcccgaaagcgctgacgtttgccgccaataagctggtgcgcccgatccaccctgaccggcggataattgcttagggtcggacatttttggcagccgcttttccagccctcgcaaccgtcggtgaaggcgcaacgcccggtgacgctccagtgatcgtgcagcgtccagaccagcgtgacgtccggtttttgcgctttgactttttcgcaaaacgtcacgatatccgccaggtttagccagtaactgtggagaacatgaaaatgcagcaccagcgggccggatgtctggataaccgtgcggtaaagattgtcgagattgccaaacagatcgcgattcaggaaacgaaacagcgcgatattagcgattgccgtgccgcgcggcgtctgttttatcacctgcggataacggtggtggctgacgcttttttttccgcctttgccataaccatagacaaaacgtgacgtcagccctttttgcagcgcccgcagatggagatccaacgccactcccgccgcgccgccttccgccagccgtacattaaattgcagaatattcatgtgctgaccttcacccgtgctttttctcccaccaccagcgcatggtccggaatactgtcaagtaccacgctacccgcgccaatcgtgacgtgattaccgatagtaatatcgccaagcaggatgacattcgcccccagctcaacgccgtgaccaatcaccggacaagccaggctgtccgcgccgcgattgccaatggtgacgccgtggcgaatggtaaaatcgtcgccggcgacgacatgtttgttaatcactaccgcgtaaccatgatggatagtgaaccgccgaccaatggtcgcggcggcctggatttcatacccgaacaggcattccgtgatcacgcgatacagcaccagcaccggcgcggcccacagattattcagcacattctttttgcgccagacggaacaaaaatgagcgatacggtaggccagcaccatgcaacaggggcgtaagctccagctattcgcgcgtaagtcttccaacatcgttatcgcccccgcagcccggccgccaggcgtttgctgttacgcacggagagcaacgtcagcaacgtgcgccaggtcattcgcttattgcgaatttggtacagcgtaaaaagctggtattttttgctggcgcgatcgaatttatctttgtgcttacgataaaaatggaaatagccggagaactttttcggcgaagaggtaatctgcatctcgccgtggttgatatgtaaaatttgcgtcgcctcttcaactttccacggttcgccatactccaccaccatgcgcagaaaaatgtcgtaatcctgcgccgccttgagttcggtatcgaacaaacacgctttaaaacgccaggcccaggtaaaaacctgattgccaataatattgcgcttgtagaacaagcggcgcgaataaggggatttcggatacagcggcaggctggcaggctgagagtagacctcgccctcgcacacatagtcgttggcatacaaaaaggcgtgcgtagtcaactggtgtttatgggccagaaacacgctcagacggtttggcgtccattcatcgtcatcatcaataccggtaatgtagtgtccttgcgcctgcataatggcctggttgcgaaccgcgcaggcgccggtattcctggcgttatgggtataacggacgcgcgggtcgttcagctcctcaacaaattgttgtagctgctgataagacgaggagcaatcatccacgatgatcatctcccagtggcggtagtcctgacgtagtactgatttaatcgcccggatagccaactgctgcctgttccaggttggcatataaattgagatcagcggattgtctgttgtcatgcttattccccagatagttttgccgcatggcgctacgcttgtccggcctacagtcacaggccgcgccatccggcacgccttattttttatttggaatctgactggtattcatactcgtaataaccataatcctggtagcccgtcgcccggcgaaaaatggagttgagaatgacgcctttgacctgaatgccattctggtcaaaacggctcagactggtttccacctcttttaaggtgttgacggcataacgcgccaccatcagcgtcgtcccgacgtggcgacccacaatcgcggcgtccgtcacggccagaatcggcggcgtgtcgattaataccaggtcgtagcggctgcttgcccaggcgatcagctcgccgaagcgctcgctcatcagcagttccgatggattaggcggcacctgaccgcgcggaataagatcaaaattagcgatcgccgtaggtttcgcgcaggaggctatctcgcctttgcccgccagaatgtcagataagccgtccacgttattggtgccgagcagttcatgggtgtagcccttgcgcatatcgcagtcgatcagtaatacccgtttatgcgtctggctgatgacggccgccaggttggcgcaaacaaaggttttaccgatagaggggctgacgcctgtgagcatgagtacattattttgcgcctgcatcatggcgaaatggaggctggtgcgcaggctgcgaatcgcctcaatcgccagatcggtcggattgcccaccgccagcagttggctctgcttgtaacgcttaatccctttaatggttttgacgctatcgcgcgctttttgccattccgacagcggaatactggcatagacgctgatcccgtgctcctccagcgcctgcgggctttcgataccgcgattaaacagcgagcgcagcagcacgccgacaatcgataacattaatcccagaataatgctgccgagaataatcaacgcctttttcggcttcagcacgcccggctgggtaatcgccgggtcaacgatgcgcacatcgccaacggtgctggcttcggtgattttcagctcctgctgtttattaagcagttgcatataaacctgctggccggactccacatcgcgggtcaaacgcacaatctcctgctgggttttcggcattgccgtcacccgcccgttcagtttggctttttcatcttccagcgctttacgtttttccagcagggtgcggtaggccggatgcgctttggtaaagagcttggaaatttccgcctctttaaacgtcaactcattcaactgggcgtcgatattaaccatcgaatcgagcaccgccttcgcctccagcggtaaatccaccgagtctttatcctggcggaaagcgtttagcttgttttccgccacatccagacggctgcggacttccggcagttgttttgccagaaacgccaggctcttccccgcctcttcagatttccgcgcaatatcctgttgcagatagttacgggtaatactgttgagaatttcgcggatctggtcgcgatcctctcccgtgaacgtcaggctcagaacgccggtatctttgccggtttccgttacggtgaggttattttgcaggttattaatcatgccaagcgttgagaatttactcaccgtaaattctgtatcaggacgggcgtcaatcgcctctacctgcatcgtcacgccgtctttattgagtggctggcccacaacgccctgcgcgctaaatccgccgtcgctaaccaactgataacgtttgtcgcccagcactttgagggtgaagatctgtccgctcatcgtctctggtcgggtgaatgtcgtgactttcaccatttcattgtgacgccccatcagccgttcccacccggcgccgaacagcggaaaggtgtttttggtgacggcaatatccagatccagatcgtcaacggtcttcccaagcaccaggcgcgatcgaatgagctgaatttccgcatcggaagccggcggcttattcgctaatgcactgttgatatcctgtaccagcgaattaccggcgttttgttcaatctgcaccagcgcatcggcgctatagatgggcgtggcgaagaacgtataaattaccgcgcacagcgcaaatatggccgtcgtccccaacacccaccaacgcgcttcaatcaccgttccgaccaggcgcccgatatcgatttcatcgctacccgtaaccgccgcagattgttttactttttctgtcatggttttccctgctctgcattcagtgcctgcgcccactggcgggcagacctttccagtaatgtgtacaccgcctcaaacgcatcgcggcttttgcgatacgggtccggtatttcacgctcgctgtcccagtgaccaaacagcattaccttgccgcgcatttccggcgcaatgtcgcacagggcggcgatgtgacgtttctccatcgtcagaatcaggtcatattcccggcacagacgcgcggaaatttgccttgcgcagtgattttccaaagacagattgtgggcgctcgccacgctcgccgccgcaggatcggcgcctttgccgaccagcgcgcctaatcctgcggacgcaaccgtcagcgagggatgaaagcgttttagcaaacgttccgccgtcggggaacggcaaacattccccacacagaccactaagattttgttaaacataacgattaccaggaatgaatgtcgctggccgtatccgtcatataacggacaccgctaatggttggcagcaactgattgatcagacggttccagcgagcaaccggcgcggtcgtgacgtacaccacatcgtaaggctgaagtcggaattccgtcgccatcaccaatgacgtggcgtcagacatatcaagctggtagatattggcgatcttgccgccgcgttccccctcgcctttcaacggacgaatcacaaaaatgccgctggcgttggaggtggtcagatcgatgccttccgcattgcccaatgcttcggtgagcgtcatgccgctgaaatccattttgagggtgctctgttttttcacttcgcccatgacaaagactttcagatcgtcattgcgcggcacatacagaatgtcgccagggtagagcaagcggttctgactaagatcgccattttgcatcagcgcctgtagcgaaatgcgctgttctttgccgttgtgcgtcaacacgacgttgcgccagtccgccatatcggtcaggccgcccgcggcgttaatcgcatccaggacggttagcggtacgttagtaatggcctgctgaccggatttattcacctggccggagatatacgctttttgcgagcggaaagcggcgatattgacatccacctgcgggtccgcgatgtacttcgctaaacgcccggtaatatcgctgcgaatctctgacaaagttttaccgacgacgctaaccttgccaatgtagggataaaacatggtgccgtccggctgtacccagttgccggtatcgcttgagctacggtactggcccgctggcgtggtcaattccgggtgatcccagacggtgacattcagcacatcgccaggcccgacgcgatactgatagctggcgatctcctggtccagcgacatattcggttgcgcgacattgggccgcgggcgtaattgctcaaccagccgtggcgtcagcggatacacattgaccatccggtcgagatcaaagtcagcgtcttgctgtttgatcacatctttccccatcgtagacatattgctgcccggaagtactgtgcaaccacttatcaagctgagcgacgccaataatggcatcaatttcattttggatttcatcattgattatttatcactttggcagagtcattatcctgtgcaatttaaatagcggcttcgtccgtgcacatttaccttgcagttaatggcagagaaaattaactggcatcattctgaaaaaaaatcaattcatccgcaggctattgacagaataataaaggcttatattcaggctttcaggcacgctaccgcccctggcttcttagctaccaatacactgattattctaaattttcgcattcccctcagattttatcctcgttcagataaaaatcttcagcgaaataaaggttacgtattaatagttttctcgatgtcgtgacaggatatttaagagcgctatcttaatcctgcaagaattgttgcagctaacctaatgacaggcaaggtaacaaacccgccattctatatttttaagattaatattaaatgaattaacagatgattttaggattttattgatgttgacaatatttatttactccactccacctgcgatatttcctaaatatattcttgacattatttaatttctgacagaaacattacggctattttaaagttattttatagccgagtaacaaagataaattgcgctgcggcattgcatttttccgccgtattatccatgatcgaattgtgacaattatcatattacagaaggtattgctcttactatggaatggattgccgatccgtcaatctgggccggactggtaacgttaatcgttatcgaacttgttctcggcattgataacctggtctttattgccatcctcgctgaaaaactaccgccggggcagcgcgaccgcgcgcgcattaccggcctgatactggcgatgatcatgcgcctgctgctgctggcgtcaatctcgtggctggtcaccttgactaagccgctttttagcgtacaggcgttaagctttagcgcccgcgatctgattatgctgttcggcggcttcttcctgctctttaaagccaccatggagctcaacgaacggctggaagggaaagatagcgccaaccctacccagcgtaagggggcgaaattctgggcggtggtcgcgcaaatcgtggtgctggacgctatcttttctctcgactccgtgattaccgccgtggggatggtcgatcacctggcggtcatgatggcggccgtgataatcgccattagcctgatgctgctcgccagcaagtcactgacccgatttgtgaacaaccatcccaccattgtcattttgtgtcttagcttcctgctaatgatcggctttagcctggtggcggaagggtttggtttccacattccgaaagggtatctgtacgcggctatcggcttctcggtgatgatcgaggcgctcaaccaactggctatttttaaccgccgccgttttctttccgctaaccatacgctgcgccagcgcacaacggaggccgtgatgcggctgattagcggtaaaaaagaggatgccgaactggatgcggaaaccgccgcgatgctggcagaccatgacgacagccagatttttaatccgcaggagcgcaggatgattaagcgggtgctgaatctcaaccagcgcaccgtaagtagcatcatgacgtcgcgtcacgatatcgagcatatcgatctcaacgcgccggaagcggaaatccgcgctctgctggaaaagaaccagcatacgcgtctggtcgtgacgggtgagaatgaacaggaagatttactcggcgtcgtccacgtcatcgatctgttgcaacaatcgctgcgcggcgaaccgctcaacctgcgggcgctgattcgccaaccgctggttttcccggaaacattgccgctgctgcctgcgctggagcagttccgtaacgccagaacccattttgcctttgtcgtagatgagtttggctcggttgaaggcattgtgacattaagcgatgtcatggagactatcgccggtaatttgccgaatgaagtcgaggaaattgacgcccgccacgatattcagaagaacccggacggttcctggacagcaaacggccatatgccgctggaggatttggtgcagtacgtgccgctaccgctggatgaaaaacgggaataccatacgattgccggattattgatggaatatttgcagcgcataccgcaaaccggtgaagaggttcaggtgggtgattatttgctgaaaacattgcaggtagaaagccatcgagtgcagaaagtgcagttaattccgctgcataacggcgagccagaccaggagatgtaacgcctgttcacctgccccggcctgcttaccaggcaggccggaggcgcgttagccttgccatccggctctgccctttggccaaaaactacagcttatccagcagtttcttcacatctttaccattgcgggtatctttattgcgctccgcccagtcgttgagccgacgcttcgcctcatcctgtaaatgcttacgcaataactgatccacttgcagggtatagttcagctcctgccacttgccatagacgcgcagcggcaccggcgtctctttcaggaaggtgatcaggttgctatcgccgttccagccgcccagcacacgcagattaaattgcgtatcacagctctgcttaaccaggtccagcgttccgctgccggttaacgccagcatagaagattgcccgaccatgtcgtcgagcgtcagcgtgcccttatttagcgtcagatcggtcgtgaagcgatccagtcgggtcgcgttgtccatattttcctgcgactgctgcgcgtcgccgccgcttcgctctacggcctgctgcaccagttgctggaaattcattccttcgaggcgcgtattgctcatgtcaacatgcgcttttcctttccagctgtggcgaaatgcctccgcgtcaatatccgccccggagaaatcgccaaccagcgacatcttaccggtcaggctaatcggataattgaaggctttcaggatagtcccaatctcaacatggttgaggcgagggtggaactcgatgcgtggactggcggtgcgggcgtcaagcgtgccgggcagcgacatctctccgtcggccagtttcccctgcaactcggtaatatccagcaatccggcctgattagacatcttcgtcgaaacctgggtaaagtccattccccgccagcgaactgaatccgcctgtaaagcaatctccgccgtaaagctttgcagcccctgataaggcggcgcaccaacacgcgacgcgataactggcctggtcagggggagcgtattttgcccctgcgacaccgcgccgcccgtctgagccacggcgctatgatgcggcaacaggttgtccagattaagcttgctggactggaggtcaatttgccattccggctgctccgccagcgttacctgaacgtgtccggtcagagaactgtcattcgccgttaaatttaagtggttaaatgaaagacgtttttgcgcctcctgccactgcgcctgcagctgtccctgcccctcaatcccctgcgccggtaaatccgcgccctgcaattgccagcgcagttgctcaatacccgcggttaagttatgcggataatcggaagcatccaccgttccgctgaacgataaagcaagatcccgctgatcgcggttcacgcgtcccgaaaaatcaaacgtgccgcgatgctcggcatcttgttccatattcagacgaatatcgcgcaccgtgacctgatcatcattttcatgctggaaaaccagcacgctgtcggcaacgcgcaggctacgaatatcaaacgaccagccgcgatcttccgctacgtccggcaaggtattatctttcggcgcgaccggcgcatcatcactgcgtaccgcttccgtttgcggcgtcagttgaatcaccccgcctttcagcatcacctgcttaacatgaagctgatgactcaacagcggccataaagcgacatccaggcgcatattgtcagcccgcaccagcggttcgctggcgcctcgcgccgttagcgtcattcgcccggaaaggatgctgagttgcggccatacgtgccagcgcagcggcccgtccagttgcaactggtattcactacgcgcggcaacctgctgcaccatataggcgcggaaatcattcggattgaccaacaataccaacgcagagaatccggccaccagcacgaccaggagaatcatcagcgtcgtcagaaatcgtctcatgctaccctcaatggaccggcagtattgcgccgaatggctcagtctttatcaatccggctggcgacagcgccctgctgatcgcgatatttggcatcctgacggcggttataaggccgcgccgccgggccggacagcggctcaaagctcagcgcgccgatgagcatacccggacgcaacgccagcggcagcttcccggagttgtaaaactcaagcacaatgcagcccgaccagccgggatcgatacggtgcgccgtcacatgcaccatcaatcccagacgcgccagcgaggagcgaccatccagccagcccactaaatccggcggcagggtaacggattcaaaggtgacagccagcgccaactcgcccggatgcagataaaatgcctcgccgtccggcaaaacgatttcatcgctcatcacgcgatccagcgccgcgctgacctcgtctttcggcccgctcagatcgataaacgccgccgtatggccacggaaggttcgaaatttattgccaagacgtacatcgaccgtcgcgccgttaatgcgctctacgggaggtcgcggggtgatagacaaacggccttcatccagccaggcttcaatatctcggtcgcataaacgcatggcactttctcctttcgcgcatcaagcccttaaatcaagcacatcaagggctaaccaggttatcactgaacggtacacaattcgccagatttattcaaagaactggctgattttcgctttcagaatatcaatagcgatgcggtttttaccgccgcgcggcacgataatatccgcatattgtttggaaggctcaataaattgcaggaacatcggacgcaccgttttctgatattgcgccatcaccgaatccattgagcgaccacgctcgttcacatcgcgtttgatacggcgcatcaaacagatatccagcggcgtatcgacaaaaatagagaagttcatctcttcacgcaaacgcgcgtcggtcagtaacagaataccttcaagaataatcactttcttcggttctacgcgaaccgtttcctgcatacgggtatgctcaacataactgtataccggtaattcaatcgccgaaccgcgcttgagcgcctgaagatgctgaaatagcaggctgtgatccatcgcattcggatggtcatagttagtttttacgcgttcttccatcgacagatggctttgatctttgtaataactgtcttcgggaataacgccaatatgttcgtcacccacttgttcacgcaattcgcggtaaagggtactggcaataagactcttgccggaagccgatgcgccagcgataccgataatgacgcactgatgagactgatcagtcataaatttagcgacctgattaacctggatgtaaggaaggggggcgccgaaacgccaaacgcggcaattatagggatttcagcagcgcgataccagtccggcgctatgccacggtgaatttgttggcggcgtattcgacgtcgcgacgtaaaagcgttcagttttaacgcggacagcggatttatcgccccgtctggaggaggaatacgccgggagccacaatttatattcagccagcgtataaatcattacgcgtttatactagcataatcacagagtaaactgacgcgtccggtattccgcgacgttaccggcgattcggatagagtggtaatgagtaaaccatcccaacatgttttcgttaccgtcccccacccgctattgcgtctggtcagtttaggcctggtcgcgtttgtctttacgctcttttcgctcgtattatcgcgtgtcggcacccaactcgcgccgctgtggttccccacctccattatgatggtcgcgttttaccgccatgcgggccgtctgtggccagggatcgcggtcgcctgctcgctcggcagcatcggagcctcactgactttatttcctgccgcctcgcttaactttagctggacggcaataaatattatcgaggcggccactggcgcgatactgctgcgaaaactgctccccagctacaatcccttacaaaatttgaatgactggtttcgtctggctatcggcagcgccgtgattccgccgctactcggcggcctgttattttggctgatagcgccggaagcggtcgcctcgaaagcgtttctgatttgggtattatcggaagccatcggcgcgctgacgctggtgccgttaggtttactgtttaaaccacactatctattgcgtcatcgcgacccgcatctgttgctggaaacgctgttgacgctggtcattacgctggcgctaagctggctcgctatgcgctatattccgtggccgtttacgtgcgttatcgtcctgttgatgtggagtgcggtgcgcctgccgcgaatggaggcgtttttaatttttttagctaccgttatcgtggtctcgctcatgctggccaatgaccccacgctgctcgccacgccgaaaaccgacgtgatggtcaatatgccgtggctgccttttttaatgatcctgctgcctgccaatatgatgacgatggtgatgtacgcgtttcgcacggagcgcaaacatatcaccgagagcgaatcccgctttcgcaacgcgatggagtattccgccattggtatggcgctggtcggtacggagggtcagtggctacaggtcaataaatctctgagccattttcttggctatagccaggatgaattacgcacgatgacatttcagcaattgacctggccggaagacctgaataatgaccttgaacagctaaacatgctggtgcgcggcgacatcaatagctattccatggaaaaacgctactacacccgcaacggcgatgtcgtctgggcgctactggccgtctcgctggttcgtcataaagacaataaacctctctattttattgctcagattgaagatattaacgatctcaagcaaagcgagcaggaaaaccagcggttgatggaacgtattacacaagcgaacgacgcgctgtttcaggaaaaagaacggttgcacatcacgcttgactctatcggagaagcggtggtgtgtattgatgtcgcgatgaatatcacctttatgaacccgatcgccgagaagatgagcggctggcggcaagaggatgctttaggcgcgccattattaacggttctgcgcattacgtcaggtgataaggggccgctgctggaggatatttatcgcgccgacaggtcgcgatcggacatggaacaggagatagtgctccattgtcataacggcggcagctacgatattcattacagtatcacgccgctcagtacgcttgacggcgataagattggttcggttctggttatccaggacgttaccgaatcacgaaaaatgttacgccagctcagctacagcgcaacgcatgacgccctcacccatcttgccaaccgcgctagttttgaaaaacagcttcaacagcgcctgcaaacaatacaggaatcgcctcaacatcatgcgctggtgtttatcgatctggaccgttttaaagcggttaacgacagcgcgggacatgccgccggcgatgccttattgcgcgaactcgcgtcactgatgctcagtatgcttcgatccggcgatcttctggcccgtctgggtggcgatgagtttggcctgttgctgccggattgtaatagtgacagcgcacgctttatcgtgacgcggcttatcaacgccgttaatgagtatcactttatgtgggaaggacgcctgcatcggatcggcgccagcgccgggatcacaatgataaatgaacataactgccagctcacagaggtcgtgtctcaggccgatatagcctgctacgccgcgaaaaatagcggtcgcggccgtctgaccgtgtacgaaccgcagcacgcattaacctcctcaaagggaatgatgccgctggaagaacagtggcatatgattaaaaataaccacctgctgatgcttgccagaaacgtcgcgccgccgcgtacgccggaggccaccagcttttggctggtctcactcaggctgtggaccagcgaaggggaagtgttggaagagcgcgcgttccgggcagggttagccgactccgcgctgcatcacgcgcttgaccgacgggtattccatgagtttttccaccatgcggcgaccgccgtcgccagcaagggattaagcgttgcgctgccgctgtccgccgcgggattatacagcgcgacccttattgatgagctgctggaacaactggagcatagcccactgccgccacggttattacatctgattatcccggctgacgttatcgttaagcaggcgcagaccgccgctgcgactctgcgaaaactgcggcaacgcggctgccaggtgattctcagccatgtcgggcgcgatttacagctgtttaatttactgcccccgcatatcgtcgattatttactgctggatagcgaccttatcgccaacgttcatgaaagtttaatggatgaaatgctgacctcgatcatccagggacacgcccagcatctggacatcaaaacgctcgccgggccggtacaaaacccacaggtgctggatacgctctcctgtattggcgtggatctgatttatggcgacactatcgccgaagcgcaaccgctggatttattactgaataccagctatttcgctatccattgacggttgccagccgtgggtataccagatatgcagtagcgcgtaggaacgccacggtttccagcgctccgcgtagcgacggatctgcgcgggcgtcatcccggcgaagcgctgcttaattaagtaatcatcgggtaaaaagatatcttttgcctgccaaccgcgcagggcgaaatagttcgccgtccagcggccaattcccggaaacgtttgtaaatttttaacgctctgctcaatatccggcggcgcggcgagcgccagttttcccgccagcgtcgcctgcgccagatgaatcagcgcttcggcgcgccgcagcggcatccccagagctttcagcgccagcggatcggccaacgccagcgtttccggaccgggaaaacagacataatcgggcgcatccggcaacgcctcgccatagcggcgcgccactttcgccgtcaaccttgccgccatcgcgacactcaccagttgccccagtatcgcccgcacgccttgttcaaacgtatcaaccgatcccggtaaacgcagccccggtctgtcctcgcccagtggccccagcacggcggcaacctgcgcgggctggcagtcaagatcaaacagacgcgaaaccttcgccagacacgccggcgcgacgggaagtaatccggcgctcacgctgacctgcacagtgtgggtgggcagatgggggctcacgctgatcagtccgcgatgctcgcccaccaccaggctgcgcgcataaaagccctcgcctaccgtttccacgccgtccaccgcacgcgcggcaagaaagcccaacatccacgaccagtcgtaaggcggctgccagctcagggtaaacatacttttctcctttatttgacctttcagcataaacgctaatcgcacgtaacgccttgctttcatattccagttgtcgccgcgacgacatttcgctaaagtcacgccccttcttcactggcatggggattttaaggtgtttatcggatttgattacggtacggcaaactgctcggtcgccattatgcgcgacgggcatccacagttgctgacaatggagaataacagcgcattactgccgtctatgctgtgcgcgccgacgcgcgaagcggtgagcgagtggctgtatcgccatcatgatgtgccggcaacggacgaagaaacccaggcgctgctacgccgcgcgatacgctacaaccgcgaggaagatattgaggttggcgcgcaaagcgtacagtttggtctggcgtcgctggcgcactatattgacgatccccaggaggtctggtttgtcaaatcgccgaaatcctttttaggcgccagcggcctgaaaccgcagcaggtcgcgctgtttgaagatttagtctgcgccatgatggtacatattcgtcatacggcgcacagccaattgccggaggccattacccaggcggtgatcggtcgcccgatcaactttcagggactcggcggcgatgacgcgaaccgccaggcgcagggtattctggagcgggcggcaaaacgcgccggttttcaggaggtggtattccagtatgaaccggttgcggcgggcctggactacgaagctacgctgcgggaagagaagcgtgtgctggtcgtggatattggcggcggtaccaccgactgttccatgctgctgatggggccgcagtggcgtcagcgcgccgatcgtgaaaacagcctgttggggcacagcggttgccgcgtgggcggaaacgatctggatatcgcgctggcctttaaaaatctgatgcctttgctgggcatgggcggcgaaaccgaaaaaggcatcgccctaccggtgctgccgtggtggaacgccgtggcgattaacgacgtcccggcgcaaagcgatttttacagtagcgcgaatggtcgtctgttgaacgatttggttcgcaacgcgcgtgaagcagacaaggtcgcgttgctgctcaaggtctggcgtcagcggcttagttaccgcctggtacgctgcgcggaagagagcaaaatcgccctttccggccaggcggatgttacggcgaggctgccatttatcagcgacgaccttgcggtcgctatcagccagcaaggactggaagcggcgctggatcaaccgctggcgcgtattctggaacaggtgcaactggcgctggacagcgcgcaggaaaaaccggatgtcatctatctgaccggcggcagcgcccgttcgccattgattaaaaaagcgctttccgaacagttaccgggcatacccgtcgctggcggcgatgatttcggctccgtcaccgcaggactggctcgctgggcagaggtcgttttccgctaagcgcctcgcaagcccagcgctgatggattgacattattcttgatgtggcttaacgtcaggagtgagggttagggaggattcctcctccccctggtgtcttagtaagcctggaagctaatcactaagagtatcaccagtatgatgactaccttcatcataaccctttccttattttggccccttcctcgggaggggctttcccgtttcagcgtcctgctgaaatcggtggcttaccttcattgccgtgccgccactttaccgcactccggcgcgttaacgattttcaccgatgagagttgcgtagcgcctcgcaaagcgagtcgccattcagaataatcccgaccgtgttccataattcctccatttttctcccttccctgctgactacaatagaggaagcaacattccgcaaaacgtttcaggatgagaaacttataccgatgaaaggcagtaatactttccgctgggcaatagcgattggggttgtagtggccgccgccgcattctggttctggcatagccgtagcgaaagcccgaccgccgcgccgggcgtcgccgcgcaagcgccgcataccgccgccgcaggtcgccgcggtatgcgcgacggccctctggcgccggtacaggccgcgaccgcgaccacgcaggccgtaccgcgctatctgagcgggctgggtaccgtgaccgccgcgaataccgttacggtgcgtagccgcgtggatggtcaactcatctccctgcactttcaggaaggtcagcaggtcaacgcaggcgatctgctggcgcaaatcgatcccagccagtttaaggtcgccctggcgcaggctcagggacagttggcgaaagataacgctacgctggcgaatgcgcgtcgtgatctggcgcgctatcagcaactggcaaaaaccaatctggtttcccgtcaggaactggatgcgcaacaggcgctggtcaacgaaacccagggaaccattaaagcggatgaagccaatgtcgccagcgcgcagttacagctcgactggagtcgtatcacggccccggtctcgggacgcgtgggtctgaaacaggtggatgtcggcaaccagatttccagcagcgataccgcaggtattgtcgtcattacgcaaacgcacccgattgatctcatttttactctgccggaaagcgatatcgcgaccgtggttcaggcgcagaaagcggggaaaacgctggtcgtagaagcctgggatcggactaactcgcacaaattgagcgaaggtgtgttgctcagtctggacaaccagattgatcccacaacgggaacgatcaaaattaaagcgcgctttaccaatcaggacgatacgctgttccccaatcaatttgtgaacgcccggatgctggtcgataccgaacaaaatgccgttgtggtgcctgccgcggcggtgcaaatgggcaatgagggccactttgtgtgggtgctgaacgacgaaaataacgtcagcaagaagcgggtaaaaatcggtattcaggataaccgaaacgtggtgatcagcgctggcttgtcggcaggcgatcgcgtcgttaccgatggtattgatcggctgacggaaggcgcaaaagtcgaggtcgttgagccgcaaaccaccgtggcggatgaaaaatccccttcccgccatgaaggtcaaaaaggagcgcgcgcctgatgcaggtattacctccgggcagcacgggcggcccctcgcgtctgtttattctgcgccccgtggccaccactctgctgatggcggcgattttactcgccgggattatcggctatcgcttcctgcccgtcgccgctttgccggaggtcgactaccccactattcaggttgttacgctctaccctggcgccagcccggatgtcatgacctccgccgtcaccgcgccgcttgagcgccagttcggccagatgtcaggactgaagcagatgtcgtcgcaaagctccggcggcgcgtcggtggtaacgctacagtttcagttgacgctgccgctggacgttgccgagcaggaagtacaggcggcgattaacgcagccaccaatttattgccttccgacctgccgaatccgccgatttatagcaaagtcaatccggcggacccgccgattatgacgcttgccgtcacctcaaacgcgatgccaatgactcaggtagaggacatggtagaaacccgcgtggcgcagaagatctcgcaggtctccggcgtcggactggtgacgcttgccggcgggcagcgccctgcagtacgcgtaaaactgaatgctcaggctatcgccgcgctcggtctgaccagcgaaacggtccgtaccgcaattaccggcgccaacgtcaactcggcgaaaggcagtctggatggccccgagcgggcggtgacgctttctgctaacgatcagatgcagtctgccgacgaataccgcaagcttatcatcgcgtatcaaaacggcgcgccggtacggttgggcgatgtcgccaccgtcgaacagggggcggaaaatagctggctcggcgcatgggcgaatcaagcgccggctatcgtgatgaacgttcaacgccagcccggcgccaatatcattgcgacagcggacagcattcgccagatgctgccccagcttaccgaaagcctgccgaaatcggtgaaggtcacggtcctgtccgatcgcaccaccaatattcgcgcttccgtgcgcgatacccagtttgaactgatgctggcgatcgcgctggtcgtcatgattatctatctgtttttacgtaatattcccgccacaattattcccggcgtcgccgtaccgctgtcgcttatcggcacctttgcggtgatggtgtttttggatttttccattaataacctgacgctgatggcgctcactatcgccacgggtttcgtggtggacgatgcgattgtggtgatcgagaacatctcgcgctacatcgaaaaaggagaaaaaccgctggcggcggcgctcaaaggcgcgggcgaaatcggctttaccattatttccctcaccttttcactgattgcggtgctgatcccgttgctctttatgggcgatattgttggtcgactgttccgcgaatttgcggtgacgttggcggtagcgattttaatctccgccgtcgtctctttgacgctcacgcccatgatgtgcgcgcgtatgctcagccagcagtctctgcgtaaacaaaaccgcttttcccgcgcctgcgagcggatgtttgaccgcgtgatcgccagctacggacgcggattagcgaaagtgctcaaccatccgtggcttacattgagcgtggcattcgccacgctcctgctcagcgttatgctgtggatagtcattccgaaagggttctttccggtacaggataacggcattatccaggggacgctgcaggcgccgcaatcgtcatcgtatgccagtatggcgcaacgtcaacgccaggtggcggagcggatattacaggacccggcggtgcaaagcctgacgacttttgttggcgtagacggcgctaaccccacgctcaatagcgcgcgcctgcaaattaacctcaagccgctggatgcgcgtgatgaccgcgtgcagcaggtgatctcccggctgcaaaccgccgtggcgacgattcccggcgtggcgctgtatctccagccgacgcaggatttaaccatcgacacgcaggtcagccgcacgcagtatcagtttaccctgcaggccacgacgctcgatgcgctcagccactgggtgccaaaactgcagaacgcgctacagtcgttaccacagctctctgaggtaagcagtgactggcaagatcgaggattagcggcctgggtgaatgtcgaccgcgacagcgccagccgtctgggtatcagcatggcggatgtggataacgcgctctacaacgcgttcggacaacgcctgatttcaacgatttatacccaggcgaaccagtaccgcgtcgtgctggaacataataccgccagcacgccgggcctggcggcgctggagacgattcgcctgacgagccgcgacggcggcaccgtaccgctcagcgcgattgcccgcattgagcagcgcttcgctccgctctccatcaatcatttagatcagttcccggttacgacattttcgtttaacgtgccggagggctattcgctcggcgatgcggtgcaggcgattctcgatacggaaaaaacgctcgccctgccagcagatattacaacgcagtttcagggtagtacgctcgccttccaggcggcgctaggcagcaccgtctggcttattgtcgccgccgtggtggcgatgtatatcgtgctcggcgtgctgtatgagagttttatccatccgatcacgattctctcaacgctgccgacggcgggcgtcggcgcgctgctggcgctgatcatcgctggtagcgagctcgatattatcgccattatcggcattattttgctgatcggtatcgtgaagaaaaacgccatcatgatgattgacttcgccctcgccgctgaacgcgaacaggggatgagtccgcgcgacgctatcttccaggcctgtctgctgcgttttcgaccgattctgatgaccacgctggcggcgttgctcggggcattgccattaatgttgagtaccggcgttggcgcggaattacgtcgcccgttggggatcgcgatggtgggcggcctactggtcagccaggtattaactctgtttaccacaccggtgatttatctcctgtttgaccgcctgtcgctgtacgtgaaaagtcgctttccgcgccataaagaggaggcgtagatgcgctttttcgcccttttcatctaccgcccggtcgccaccattttgattgccgccgccattacgctgtgcggcattctgggctttcgtctgctgccggtcgccccgctgccgcaggtcgatttcccggtgattatggttagcgcctcgctgccgggcgcctcgccggaaaccatggcttcgtcggtggcgacgccgttggaacgttctttgggacgcattgcaggcgtcaatgaaatgacctccagcagctcgctcggcagtacacgcattattctcgaatttaatttcgatcgtgatattaacggcgcggcgcgcgacgtgcaggccgccattaacgccgcgcaaagcttgttgccaggcggaatgcccagccgcccgacttatcgcaaggccaacccgtccgacgcgccgattatgattttaacgcttacctcggagagctggtcacagggcaaactgtatgatttcgcctctacccaactggcgcaaaccatcgcgcaaattgacggcgtcggcgatgttgacgtcggcggcagctccctgcccgcagtacgtgtaggcttaaacccgcaggcgctctttaaccagggcgtctcgctggatgaggtccgcgaagcgatcgacagcgccaacgtacgccgaccacaaggcgcaattgaagatagcgtccaccgctggcaaatccagaccaacgacgaactgaaaaccgccgccgaatatcagccgctgattattcactataacaacggcgcggcggtacgcctgggcgacgtcgccagcgtcactgactcggtgcaggatgtccgtaacgccgggatgacgaacgctaaacccgctattttgttgatgatccgcaagctgccggaggccaacattattcagacggtcgacggcatccgggcaaaactgccggaactgcgggcaatgatccccgccgctatcgatttacaaatcgcccaggatcgttcgccgacgattcgcgcatcgctgcaagaggtagaagagacactggctatctctgttgcgctggtgatcctggtggtgtttttattcctgcgttccgggcgcgccacgctaatccccgccgtcgccgttcccgtttcgctcatcggcaccttcgccgccatgtatctgtgcggcttcagcctcaacaatctgtcgctgatggcgctgactatcgcgaccggatttgtcgttgatgatgccattgtggtgctggaaaatatcgcccgccatctggaggcgggaatgaaacctttgcaggcggcattacagggtacgcgggaagtcgggtttacggtcatctccatgagtctgtcgctggtggcggtatttctgccgctgctgttaatgggcggcctgccaggacgattattacgggaattcgccgttaccctctcggtggcgattggcatttcgctggtggtctcgctcacactgacgccgatgatgtgcggctggatgcttaaatcaagcaaaccgcgcacccaaccgcgtaaacggggcgttggccgtttgctggtcgccttgcaacagggttacggcacgtcgttaaaatgggtgcttaaccatacgcgtcttgtcggggtggtttttcttggcaccgttgcgctgaacatctggctttatatcgccatccctaaaacattctttccggagcaggacaccggcgtgttgatgggcggtattcaggctgaccaaagcatctctttccaggccatgcgcggcaagctgcaggattttatgaaaattattcgcgacgatccggcggtgaataatgtcactggttttaccggcggatcgagggtgaatagcggcatgatgtttattacgctgaagccgcgtggcgaacgcaaagagacggcgcagcaaatcattgatcgactgcgggtcaaactggcaaaagaacctggcgccaggctgtttctgatggcggtacaggatattcgcgtcggcgggcggcaggctaacgccagttaccaatatacgttgctgtctgactctctggcggcgctgcgcgaatgggagccgaaaatacgcaaagcgctctcggccctgccgcaactggcggacgtaaactccgaccagcaggataacggcgcggagatgaaccttatctacgaccgcgacaccatgtcacggctgggtattgatgttcaggccgcaaacagtctgttaaataatgctttcggccagcggcaaatttccaccatttatcagccgatgaaccagtataaagtggtgatggaagtcgatccgcgctatagccaggatatcagcgcgctggagaaaatgttcgttatcaaccgtgacggaaaagcgattcccctctcttatttcgcccaatggcggcccgccaatgcgccgctgtcggtgaaccatcagggactttccgcggcgtccacgattgcctttaacctgccgaccggcacatcgttatcgcaggcgacagaggccattaatcgcaccatgacgcagcttggcgtcccctcgacggtacgcggcagtttttccggaacggcgcaagtcttccagcagaccatgaattcacagcttattttgatagtggcggcgatcgctaccgtctacattgtgctggggatactgtacgaaagctacgtccatccgctgaccattctctctactctaccatcggcgggcgttggggcgcttctggcgctggaactcttcaatgcccctttcagcctaatcgccctgatagggatcatgctattaattggcattgtgaagaaaaacgccattatgatggtcgattttgcgcttgaagcgcaacgaagcggcggcctgacgccggcacaagccattttccaggcctgcttgttacgcttccgtccaataatgatgaccacgctggcggcgctgttcggcgcactgccattggtgttatctggcggagacggttcggaattacggcagccgttggggataaccattgtcggcggtttggtcatgagccagctcctgacgctctataccacgccggtggtgtacctctttttcgatcgtctgcggctgcgtttttcgcgtaaaaatagcaaaccggtagtagaaatatgacagaacttcctgacaatacccgctggcaactctggattgtggcattcggcttttttatgcagtcgctggataccaccatcgtcaacactgcgctgccctccatggcgaaaagcctgggggaaagcccgctgcatatgcacatggtagtggtgtcatatgttcttaccgtcgccgtaatgctccccgccagcggctggctggcagataaaatcggcgtgcgtaatatcttctttgccgccattgtgctgttcacgctgggttcgctgttttgcgccctttccggcacgcttaatcaactggtattagcgcgggttttacaaggcgtaggcggcgcgatgatggtgccggtcggacgcctgacggtcatgaaaatcgtgccgcgcgcgcaatatatggcggcgatgaccttcgtcaccctaccgggacagatcgggccgttactcggccccgcgctgggcggggtgctggtggaatatgcttcatggcactggatctttctgatcaatatcccggtgggaatcgtcggcgctatggcaacctttatgctgatgccaaactacaccatagagacccggcgctttgatctgccggggttcctgctgttagctatcggcatggcggtactcacgctggcgctggatggtagtaaaagcatggggatttcgccctggacattagccggacttgctgcgggcggcgcggcagccattctgctctatctcttccatgccaaaaaaaactcaggcgcgttattcagcctgcgattgttccgcacgcccacgttttcactggggttgctgggcagttttgccgggcgtatcggcagcggtatgctgccgtttatgacgccggtctttttacaaattggtcttggtttttcaccgtttcatgccggtttgatgatgatccccatggtgctaggcagcatgggaatgaagcggattgtggtgcagatagttaaccgttttggctatcgtcgggttctggtggcgactacgctcggactggcattggttagcctgttgtttatgtcggtcgcgctgctcggctggtattatctcctgccgctggtactgcttttgcagggaatggtgaactcggcgcgcttttcttccatgaataccttaacgctaaaagaccttcccgatacgctggccagcagcggcaatagcttattatcgatgattatgcagctctcgatgagtatcggcgtcactattgccggaatgctgctgggtatgtttggccaacagcatatcgggatagacagtagcgccacacatcacgtctttatgtacacctggttatgtatggcggttattatcgcgctaccggcgataatttttgcccgcgtgccgaacgatacacagcaaaacatggtcatttcacggcgtaaaaggagcctgtaatgaaagtctggcggcccggaatcaccggcaagctgtttctggcgattttcgccacctgcatcgtgctgctgatcagtatgcattgggccgtgcgcgtcagttttgaacgcggatttattgactatatcaaacacggcaacgagcagcggctacaaatgctgggcgatgcgctgggcgaccagtaccagcaacacggcaactggcgttttttacgcaacaacgatcgcttcgttttccagattttgcgttcatttgagcatgacaacgaccgggataaacccggccccggtatgccgccgcacggttggcgcacccaattctgggtcgtcgatcaaaatggccgggtgctggtcggcccacgcggtccggtgccgcatgacggtactcgccgccccattctggtcaatggcgccgaagtcggcgcgattatcgcctctcctgtcgagcggctgacgcgcaatacggatattaattttgatatgcagcagcggcgcgccagttggatgatcgtggcgttatcaacgttgctggccgcgctggcgacgtttttgctggcgcgtggcctgctcgccccggtcaaacggttggtcgagggtacgcacagactggcggcgggggattttaccacgcgcgtgaccccaaccagcgccgatgagctgggaaaactggcgcaggactttaaccagcttgccagtacgctggaaaaaaaccagcagatgcgccgcgactttatggcggatatttcccacgaactgcgcacgccgctggcggtattgcgcggcgaactggaagccattcaggatggcgttcgccagttcacgccagaatcggttacctcgctacaggcggaagtcggtacgcttaccaaactggttgacgacctgcatcagctgtcgttgtctgacgagggcgcgctggcttaccaaaaaacgaccgtcgatcttgttcccctgttggaagtcgctggcggcgcgttcagagagcgctttaccagccgggggctaacgctacattacgcgttgccggatagtatgaccgtcttcggcgacccggatcgcctgatgcaactgtttaataatctactggaaaacagtctgcgctacaccgacagcggcggcggcctgcatatttccgccgaacaacgcgacaaatcattattcctgacctttgccgattctgcaccgggcgtcagcgatgaacagttacaaaagctttttgaccgtttttaccgcacggaagtgtcccgtaaccgcgccagcggcggttctggactggggctggcaatatgcgtcaatattgtacacgcgcataacggtcatcttcacgccgctcattcgccttttggcggggttagcattacagtagagttaccgctggatcgcgatttacagagagaagtatgactgaattacccattgatgaaaacacgccgcgcattttgattgttgaagatgaacccaagctgggtcagctgcttattgactacttacgcgcggcgagttacgcccccacgctcatcaatcacggcgacaaggtactgccgtatgtgcgtcaaacgccgccggatctgattctgctggatctgatgctgccgggtaccgatggtctgacgctatgccgggagattcgccgtttttccgacatccccattgtgatggtcacagccaaaattgaagagatcgaccggctgctggggctggaaatcggcgccgatgattatatctgtaagccttacagcccgcgcgaagtcgtggcccgcgtgaaaaccattttgcgccgctgtaaaccgcagcgcgaactccagcagcaggatgccgaaagcccgttaatgattgatgaaagccgctttcaggcctcctggtgtggtaaagcgctggatttaacccccgctgaattccgcctgctaaaaaccttatcgcttgaaccgggtaaagttttttcccgcgagcagttgttaaaccacctctacgacgactaccgtgtggtgaccgatcgtactatcgacagccacattaaaaacttgcgccgtaaactggaatcgctggatgccgaacagtcatttatacgcgcggtctacggggtgggatatcgctgggaagcggatgcgtgtcgcctggtataatgattattggcataacaataacaaggtcgtaagacgatattttccgccaacgctattctggcggaattaacacacagtcctctttcctttggccgagcggtatcccgaaaaccacgacgaacgcggtcggggacaataaattatttggccgctctttttagtttaccgatatactatgagtagttttttaaacttattgcgcattaattcattaagtgaatctaaaaatacataaacataataccagcttaattatacatggatttttatgacagaaacgtcatctcaccgctataaaccacgcaatataataaatgcgccaaatgtaaaatcgtctattttttcccggagccaacaacgcggcgacagcgaaaatatccagcgctggttaagcaaccatttttatcgttggatcatcggtgactttcctcatgtttatcctgtgcgttccgtcgccgattatgccgtttattttagcgctgatgcagaaatccccgcctggctggcgccaaagctgggtggcgatgagcgcttttactaccttaacgttcagcacccgcaacttgtggcaatggaaagagatttagtggaatttctttcgcgtcaggaaggaacgcggctggaaactaaactgcagcgcatcaactgctttaccgtgctggcaatgcgcgaagcggagcatcaaaaaatgcagcgcctgcgtgaacaaggttggtatccctccaacagcgaggcgctaaaaccggtgatgacggtgaataacggtgtgctggttgaacttgatgcaacaaatcccggcctgcgcagtgagatggcgtatgaatcctggcatatgcaacactgcgacggagattttgataataaaggcgcgctttccggcggctacggcgattactacgcccggcaaatggaacaacaaaaacttcgcctgttcagcctgcgcgacggcaataatattccccacgtcacaataagcctggtggttggtaataacggcctgagcattgatcagattaaaggtaagcaaaatcgccatcctattaagaaatatgctaacgatgttttatctctgttacgccatctgcaaccacttcctgagcgccacgctgattgcgaagggatgggaatagtttatgaatcgacgccggaatattcaggttggaaatttattactcatattcatgacctcaattttctgctcaatgtgctgcatgacaattttcatttaatggagcacttccctacgcctccggtggctttacagtggctgctgctgcacagcgccccggaggcactgcgctaccttcaggttgttgatcctaacgtggcgacggctgcggaaatgctgtttccgcagcatgaatggcatcctacgcttgccgggaaaaacaccagtagcgaacctttcgaaattgaaagcctgacgctacaaaccacgcgttacctccctgtcatcaaggaggtgcaataatgttctggattgttcttattattgccgccctattttttagctggcgcaactacaaaaaaaacaaaccgctgattgcggcccgtatcgccgaggagaaagaaaaagatcgcctgaaagacctgcgtcgcgatacccgacggcggcaatgggcgctggcgctagctgatatcctcgcccggcgcaacgggctaccgatcaaaggcgttgagctggtatttaaacttgacgatgacaaacgccgctatctggcgcagcaggtaaaaaaagagctgggcttgagcgaaaacctcgacggcgcggcgttacgccacaaggttgaggatatcttacgccgctggcctgcgggcatcggcagctcgccgcgcacgttttatcatcatctggcggcccagggccaggtccgcgacgcgctggccttcgactgtatgcgcaccgcctttctgacccgctgtatcgccgggctcggctggtgtaacgaaaacgaggcctggctggtgctattgctcaacgcccagcgcgctcaggactgttttgattcctgggaggattacgccaccgcctacgttcgcgctcgccgggtatggctcacgctacgtgacacgccaacagcgcttgccggacgggatttacaggaagccacccattatctgcaagaccctgtcagccgctggcgacaactgccgtggaatgaattcaaaattttcgagccgatttaaaggactatttatggaacaggatgatcgtctgctcaacgctatgtttgagatgtgcaaccacaaaaatcccctcaatgacgggcaacgagagtggcatatcgccgatatttccggcctgctgcgcgaagaacgctatgacgaactggacgaacgctacaaccagacgctgacggagagctttaccagccgcgaagcggaaaagcgctatttcttcgcctggaatcaaatggacaaccctttttacgatatggacacgctggttgaggctgggccgcaaggattagcgctgatcaaaaactggcagcgcgcccgcccccgctccactcacgcctggcttgccgaggcgcaatactggaatcaccgtgcgtggctgtatcgcagctatggctgggcgagagaaaccacccgagcgatgtggatctgcgccgccgcctgcaacgaacggatggtcatcgccgtgctcaatgctatcgactgtgaaccgcgccagtggatggcggcggccctgaccagcaccaactcaaaagtcttcggccagcccgactggctggttgagttcctcgagggcgcggatgttgccgggcagccattaatggaggatctggctgaatatcatcgccattcaccgcaggaggtggacgcgctgatggcccattccgggctgtcgtttgccgacgcggtttgcccaaatttgccgcgcccgtccgtgctgccggagtgcaatgacgatgccgggcaaaaatactggctcaccgtctgcctggctattttcccgacggcattttacgtgctggatgaatatatcccgtttcgtatgccgcgctggggagggtctcacgaggaaatccgcgaatttctggaatcaagcgtatgcgatcacctttctgccgcagaacgtgaacatctggagctattgatctggtgggacgatcaccgcgatctgcgcatcaaagaggttgactccccggcagaacaggaacgcattatcgccaaagccgaagagattagcctgcgagcgcatatccaggaatctcgccataacacgctgaagtggctgcgggtctgctatagcgatctggacgataatgacgcgctctggcgaacccttcagcgttcgatcgtggaaaaagttaagttcaacaattacttctttgatgacacgataaagttcgccctgcgcgattttcctgacacctggtggatgtataattttctctgtcagaatgcgcagcaaacggaattcgcagtgccgaaaatccgtcgtggctactttcagtacgccgggttattgggtttcgaaaaggatgaggcgcaaggcctcgcctggctcgatagcgtcgccgacattcaatataaccataactggcgggcggcgattaaaaatttcgactggttcgggctcccggaacatttcgtgccgctggcagagctgggcgcacaaagaaatatacccgccgcgctaaacctgctgggccttgaacacaataataaagagaacaacggcctactaccttacgatcctgccatcgcgttagggtattttcagcgcgcggcggagattttgcaccggcagttagcgctgcgcgagagccccccgtacaaattaatagataacggaggctataccgactatgaaaatgacctgcaaaatattcatttcagcattggcatctgcaaccagcgtctgagtaaacaagaacctgataccgaaaaacgttccgcttatgaaaaagaactgctcgataatctctggctggcgcatcagtacgggcataaagaggcctggggcttgttcctgctgaatatttttgaagtgaaggatattacgctggcgcataagcatctggaactggtgcaacaagaagccaacaaaggcacgctacacgctatggtgaccctatcgcgcctgcatggtaataaacacgatcgaacgctgtttaatatgaagctaagcgcacgctgggcgcattttgccttcacgctttacccggataatgaaatcgttatggactgcctggaccacctgcatttcgattctttctggaaacgcttccgtttcgcgtggtataccgtccgcatcccgaattcagagctgccgggacaggtcaactcaatggtgtaaggtggtttactcccctctcccacggcgctacaatgcccgcccttaaagtgaggactctcctcaagccgcctcatcaggtgaggcggatctgacctgtcatcagaacgagaaaatgatgtttaaaccagaacttctttcgccggcgggaacgctgaaaaatatgcgttacgctttcgcttacggtgccgatgccgtctatgcgggccaaccacgctactctttacgcgtgcgtaataacgaattcaatcacgaaaatttgcagcttggcatcaacgaagcccacgcgctcggaaaaaaattctacgtggtggtgaacatcgccccgcataacgccaagctcaaaacctttatccgtgacctgaaacccgtcgtcgagatgggcccggatgcgctgatcatgtccgatccagggttgattatgctggtacgcgagcacttcccggcaatgccgattcacctgtcggtacaggctaacgccgtaaactgggcgacggtaaaattctggcagcagatggggctgacccgtgtgattctctcccgcgaactgtcgctggaagagattgaggaaattcgccagcaggtgccggatatggaaatagaaattttcgtccacggcgcgctatgcatggcctattccggccgctgcctgctttccggctacatcaataaacgcgatccgaatcagggcacctgcaccaatgcctgccgttgggaatataacgtgcaggaaggaaaagaagacgttgtcggcaacatcgtgcataagcacgaaccgattccggtacagaacgttgagccgacgctcggtatcggcgcgccgacggataaagtgtttatgatagaagaggcccaaagaccgggcgaatacatgaccgcgttcgaagacgagcatggcacctatatcatgaactcaaaagatttgcgcgctatcgcccacgtggagcgcctgacgaaaatgggcgtccactcgctgaaaatcgaaggccgcaccaaatccttttattactgcgcccgtaccgcacaggtctaccgtaaggccatcgacgacgccgccgcgggtaaacccttcgaccctacgctgctggaaacgctggaaggtctggctcatcgcggctataccgaaggtttcctgcgtcgccatacgcacgacgattaccagaattacgagtacgggtactccgtttccgaacgccagcaatttgtcggcgagttcaccggcgagcgtaaaggccaactggcggccgtggcggtgaagaataaattctccgttggcgatagtctggagctgatgactccgcagggaaatatcaatttcaccctggaacagatggagaacgccaaaggcgacgctatgccggtggcacctggcgatggctataccgtctggatgcccgtcccgcaggacgttacgctggattacgcactattgatgcgtaatttctcaggcgaatcaacgcgtaacccccatgctaagtagttaattgcggttattttttcatggcgggaagattcttagaaattgatcacataccgcttcgctcaatgcgggtattattcaacgcgctgaaaaacataacccataaatgctagctgtaccaggaaccacctccttggcctgcgtaatctcccttacgcaggcttattttttgcgtataatcaataaaaaagtggtacttcccgccatagccaacattgaccacactaaccaaagcgcaaatgggcgcttaggtttacagacctcccctattcatggccagccagcaagtcacaatcctccccgcatccggtcggactcaggacttagcattctgacttttacgtttaacatcagtgaattaaatcaataactgctttgtgagaacttacacaaaaagtttccagattattaaattaaggttaaaaactgataatttaagcgtgtaaaggtatggcacgttttaatgccgcttttacaaggattaaaataatgtttcccggattagaggtttgatttcatgtcaaagtaatactcaaaccatcgcacctacgctcagtccaccttcatcaggccatgtaagttttgctgggattgattatcctctattgccaccagatcaccaaatccccttcccaccgtcacgtataatcggtatccagagttattcctttatcctgtaaaatgtgatacagtttctccattgatctaataactacctcaatttcacattccagtttctctacagaactttcatttagtgagaagttgagagccaataataatgattgtgagttattatcataacacaaatgtggtccattattctctgcaaaccataaattagcattgagaaattcaaaagcaagattattattatccggaggtcttccgcaaaaaccgtatatcattatatactcactgttagtgcttgttagtaagatacggtaacggttatctataataaatgagcataatctgttttcgtcaaagacaattgaatcggcatttaattttagtgaaaactgtcttaataagcgatcggctcttgaatacataacaccccatactctatctaaagcgttcctatataagtcataagcctctggtctggacgcttaacaccccgtgtcatcgtcggaattcgtcttttccctatgacttgctgtgtttgctcatttatggccaggctggccgggttctgatgccatttgcgctaaggtatagtccggcgcatattcccatcataccaattccccccatgccaaacgatgcgcctaaaaccgtcagggcggtagtatatgcagtaccactactgacactggcgacagcccctgagcataccccactgaaaacacctgcaaacaatgccgtggttcccaggcacattaaacatctgggtttattgccataagcgttaaaatcaacgatttcagctaccggtttttcgtcattaccccgttcagaaggagggagcaatggcgtttgcgcattcacgcctgaagtgacattcatataaacctcttcatgcacatgcctgtttatgtttatgagaaaagcgatacatcaggcaacggtacgactataggacaccgcgctaagccatcatctaaataggttttatttgatatatagtagcgtgcttctaatagtgcgccgtgtttctgctaaagagtctaaagaacatttcgattttatgctattaaaaagtatgtttggtaataaatatcaggtttttatctgatattatggtgtttgaaattaatactgataactgacgtatgttcgtcttgttaattctccgtttcgttatcaaaggcgctatatcggaaagcgtctgactaccccttgtgatttccttgcactctcacaagcgctactcaatgcgcataccggcatctctcttgtcgccatttgccttaaaccatgcttcacttaccgctgcgtacagcaggaagaaaaacggtaaagcaataagtgcgcaacatttcaattttcatcctgttctgacctcgctttttcatttctgctatacactttctggagattgttgttcaacctattaaggcataacggatggctaactttcccgccagcttactgatcctcaatggcaaaagcgctgataaccagccgctacgtgaggccattactctacttcgcgacgaaggtatacagattcacgttcgggtaacctgggaaaaaggcgacgcgcagcgttacgttgatgaagcccgtagactgggcgttgaaacggtgattgccggcggcggagacggtaccattaatgaagtgtcgaccgcgctcatccagatccgcgacggcgtagcccctgcactgggccttttgccgctcggcactgccaacgattttgccaccagcgccggtattcctgaagcgctggacaaagcgctgaaactggcgattgccggaaacgcgatggaaattgatatggccagggtcaatgataaaacctgttttatcaatatggcgacgggcggttttggcacccgcattaccaccgaaacgccggaaaaacttaaagccgcgttgggcggcgtctcctatcttattcacggtctgatgagaatggatacgctgacccctgaccgctgcgaaatacgtggcgaaaactttcactggcagggagatgcgctggtgatcggcatcggcaacggtcgtcagggccggcggcgggcagcaattatgtcctaccgcgctggttaacgacggactgttacagctacggatttttaccggcgaagaactgctgccggcgctgttttccacactcacgcagtcagatgacaatccgaatattattgacggcgcctcagcgtggtttgatattcatgcaccgcatgaaatcacgttcaatctggatggcgaaccactcagcgggcaagaatttcatattgaggtgctgcctggcgcattacgctgtcggctgccgccagactgcccgttgctacgttaataacaccagtcgctggccggatgcgctcacatccggcttttcttcgttgaactcaggcgatggtgactttgctatccagatagacatcctgtacggcattaatcaacttcacgccatcagccatcgatttcttaaaggctttacgtcccagaattagtcccattccaccggctcgtttgttgatcaccgcggtacgaaccgcgtcgccgagatcagtgtcaccgccgtccgcgccgccggagttgataagcccggcgcgtcccatatagcagttcgccaactggtaacgaaccaaatcaatcgggttatcgctggtcagtttgctgtacacgcgatcgtcggtatagccgaagttgaccgctttataaccgccattattctcggccattttctgtttcacaatatccgcaccaatcgtagcggccagatggttggcttgccccgtcaggtcagcggatacatggtaatcgacgccgtcttttttaaaggaagaattacgcaggtaagcccacaatacggtcaccatacccagctcatgcgcacgctcaaaagcggcggagatctcttcaatctggcgacgggactgttccgaaccgaaatagatcgtcgcgcctaccgccacggcgcccatattgaacgcctgctcaacgctggcgtacagggtctgatcgtactctgtcggatagctcaatgtttcgttgtgattcagtttgaccaaaaacggaatacggtgcgcatagcgccgtgaaaccgaggccagtacgccgtaggtagaggccacgcagttacagccggcctcaatcgccaattcaacaatattttttgggtcaaagtagcgcgggttggccgcaaaagaagcgccggcggagtgctccactccctgatcgacgggcagtatcgaaaggtatcctgttcccgccaggcgtccagtattatagagcgtctgcatattacgcagaacggctggtggacgattattgtcaatcatcacccggtcaacgtaatccttgccgggtagataaagctgatcggaaggaatggtcatacaacgatgctgtaaaaggctgtcggcgtctttgccaagcaactgcgcaatatcagtcatagctatgctcccgtaagttccgatagggtatcggaaggtgaatagtcctgccccgcagattgcgggtcgcaataagcctggtactgaccgaccatttttgccaactttagcgcattttttcggcgctatctgctgactcgattcacgtccgaaaaagtgttagatcggtcaaaattaatgctcaatggtatttaaaaggtattattaagtggtattgtcgtggcgtaccttacctgtcatgaaggattcaaaaatgaaaacgacctttaaactgtcgttcatgatgttcgtggagtggtttatctggggcgcctggttcgtccccctgtggctatggctaaataaaagcgggttttccgccggtgaaataggctggtcttatgcctgtaccgccattgcggcgatcctgtcgccgattctggtcggctccgttaccgaccgttttttctcagcgcaaaaagtcctggcggtactgatgtttgcgggtgccgtactgatgtatttcgcggcacagcaaaccacctttgccggattctttccgctgctcctggcctattcattgacctatatgccgaccatcgcgctgacaaacagcattgccttcgctaacgtaccggacgttgaacgcgattttccacgcattcgcgttatgggaaccattgggtggattgcctccggcctcgcctgtggattcttgccgcaaatgttaggctataacgatatttcccccaccaacattccactgctcataaccgccgcaagttcagcgttgctgggcgtatttgcgttctgtctgccagacacgccgccaaaaagcaccggcaagatggatattaaagtgatgctggggctggatgcgctggttctgctgcgcgataaaaactttctcgttttcttcttctgttccttcctgtttgcgatgccgctggccttctactacatcttcgctaacggctatctgacagaagtgggaatgaaaaacgccaccggctggatgacgctcggccagttctctgaaatcttctttatgctggcgctaccctttttcactaagcgctttggtattaaaaaggtattattacttggtcttattaccgccgcgatccgctacggcttttttgtctatggcggcgcggagacgtacttcacttacgccctgctgttcctcggtattttgctgcacggcgtaagttacgatttctactacgtcaccgcctacatttatgtcgataaaaaagcgccggttcatatgcgtaccgctgcgcaagggcttatcaccctctgctgtcagggattcggcagcctgctggggtatcgcctcggcggcgtgatgatggaaaaaatgtttgcttatccgcaaccggttaacggtctgacattcaactgggcgggcatgtggacgtttggcgcagtgatgattgccgtcatcgcgctactgtttatgattttctttcgcgaatcggacaaagagatcactgctattgacgatcgcgatattgcgttgacacaaggggaagtaaaatgaaagcagaacgtattctcggtgctctttacgggcaagcgttaggggatgcgatgggaatgccctctgagctgtggccgagaacgcgcgtcaaagcgcatttcggctggattgaccgctttctgcccgggccaaaagagaataatgccgcctgctattttaaccgcgcggagtttacggatgataccgcaatggcgctctgcctggccgacgcgctactcgaatgcgaaggcaacattgatcccgagattattgggcgtaacatcctcgcctgggcggaacgctttgatgcgttcaataaaaatgtactcggcccgacgtcaaaaattgcgctgaatgcgattcgcgacggcaaacccatcgcggcgctggaaaataacggcgtgactaacggcgcggccatgcgcgtttcgccgttgggctgcctgttgccgccaactaacctgacagcctttatagcagaagtagcgttagcctccagcccgacgcataaatccgatctggcggtggctggcgccgtggttgtcgcctgggccgtctcgcgagcggttaacggcgacacgtggcaaagtattgccgactcgctccccgccatcgcccatcaggcgcagacagcgcgtattaccacgtttagcgcctcgctatcggcacgtctggaactggcgctaaacattgtccgccacgccgacggcgtcgaatctgccagcgaacagctctatcagatcatcggcgcgggaaccagcaccattgaatcggttccctgcgctatcgccatggtggagctggcgaataccgatcctaaccgctgtgccgtgctgtgcgctaacctcggcggcgataccgacactatcggcgcgatggctaccgccatttgcggcgcgttgcacggggtaagcgccattaacccccagttaaagcaaacgctggacaaggttaatcagctggattttgcgcgctatgccgttgcgctggcgagctatcgtcaacggcgggaggcactatgaacggcgcacggttgctgacattattaccgaccctgcatacccggcgtccgctcaccgttatcggcgcggcagtgatcgatatcattgccgacgcctggacgttgccgcgtcgcggaggcgatattgaactgcaacaacagagcgtcaatgtcggcggctgtgcgctgaatattgccgtggcgttgaaacgactggggattgacgccagcaatgcgctgccgctgggccagggcgtgtgggcggagaggattcgccgccgtctggcaaaagagggattatccagcgtgattgacgcggttgaaggagataacggctggtgtctggcgttagtcgaaccggatggcgaacgcacgtttatgtcttttagcggcgtggaaaaccagtggaatgcggactggctgtcgcagctcaggacaccgcggggcagtcttgtctacctgtccggctatcaactggcctcgtcctgtggcgagccactgatccagtggctggaaaccgtcgacgatgtaacgccttttatcgattttggcccgcgaatcggtgatattacagacgatgcaatggcgcgcattatggcctgccggcccatcgtatccctcaatcgccaggaagccatcatcgccgcggaacgcgccgggcttgcgaccgatacccgcactttcggcgaagcatgggtaaaacgcttttccgcgccgctggtggtgcgccacgataaagacggagcgtggtattttagcgcgcaatcttccggcgttgtgccagcgtttccggcaaccgtggtggataccatcggcgcaggcgacagccatgctggcggcgtgctggcaggactggcgtcaggctggtcgctcgcggatgccgtactgctgggaaatgcggtggcgagctgggtggtcgggcatcgcggcggcgactgcgcgcccacgcgcgaggcgctactcctcgcacacaaaaacgtataggtcgctacgacaataactgatgctgtattcaataggccgctgctgctgatcgagcgccacctgcttaatcaccagcaccggcactttaccatccatttgaatatgcgactgaaactcatcatccggcatccgggcgctgacgcgggatcgggtacgctgagggtaaatgtgctggcgacgaaaatagtcatacagcgaaatgccaatcgcgtcgacatcatgaatcagatgcgcgggcacccaggactcttcaatcgataccgcgtcctcatcaacataacgaatgcgtttgagtaaaaagacgtcgctgcctgcggggatcgccagatgctgcgcgacctcatccggacaacttaccacgcgtttgttaacccatagcgtatccggttttttgccgcgcaagacaacctgctgagaaaatccccgcgcctctttcagggaatattcaaagatattattgatttgcgtaccgtagccgcgggcgcgcgtgacgaccccctcttcttccagcgcctgcatcgcttttcgtaccgtgatgcgcgagacgccggtaagctggctgagatcgcgttcgccaggcaaaatattaccgtgctcaagaataccgctgcgcacggcatcctttaccgtctgggcgaatttcatgtatagcggcgtattatccgccgctgaaattcgttcattcagttgcgcgatgagccgggtatgcgcttgttccatttatctttcctgacgacgggtctgtaggcagtatactaccaccacgcgtggaaatgatgtaccggaccaatgcccttccccacttccagcgtgtccgcctgcgccagcgccgccgaaagccatgccttcgcctcgtttaccgtctctccccaacagcgatgccggggccgtaacgccgccagcgccgccgacagcgtacagcccgtcccatgcgtatttttggtgttcacacgcggcgcgctaaaacgttgctcgccctcacgggtaaagagccagtccgggctttgcgcatcctctaaatgcccgcctttcatcaataccgcttcacaccccatcgccagtaacgcccgcccctgcgccagcatctcctgttccgtacgtgcatggggcgcatccagcaacgctgcggcttccggcaaattaggcgtaatcagcgatacctgtggcaacagccggacgcgtaatgtttctatcgcagagggcgagagcagcggatcgccgcttttcgccagcatcaccgtatccagcaccacattacgtacatgatgacgctgtagtcgctccgccacggcctcgacaatatcggtttccgccagcatgccgatttttgtggtatcaatgcgcacatcgctgaacacggaatcaagttgagcggcgacaaagtccggctctatccggtacaccgactgtacgccacaggtattttgcgccaccagcgcggtgatgaccgaacagccatatgcgcccagcgcggaaaaggtcttgagatccgcctggataccggccccgccgctgggatcggtgccggcaatcgtcagcgcgttaattcgttgcattggccgcctccacatccagatgatagagcgcatcaagaaaagccgggatgaagctaccaggtccttcgctacgctctgccgcggcctgtccagccagtttcatccagcagcaggccgacgcgacattgtccagcgcggcgcccggtaacgcgcaactggcggcgacgaccgccgacaacgcgcagccggtgcctacaatgcgagtcattaacggatcgccgccgggaatgctcagcgtgcgctgaccattagtgacgtaatctatctctccggtaaccacaacgatgcagtctatctgacgcgccagcgcctgcgccgcaggcagtgcggccaacgccgcctcggtggtatctacgccacgtccgcccagcgccatgccggataacgccaggatttccgaggcgttgccgcgtattgccgccgggcgcagggacaagagatccaggcaaaatcgccgacgaaattccagcgcgcccaccgcgacaggatcaagcgtccacggcgttttggcatcataagcgctttctaccgccgcacgcatcgcgtcagcgcgtgaggcagttaatgttccgacattaatcagcaaggcgttggcgatggcggcaaacggtctggcctcgacaggatcaatcaccatggcgggtgaagcgcccagcgccagcaacgtattggcggtaaacgtttgtacgacgtcattcgtcatacagtgcgtaagcggggagagcgcgcgaaagtgttttaacgtatgcgccgcaagcgtgcggcagtgcaggtcaggctgcatggttcagctcctgcccgcgtgaagaagggacacgagcagtgtcagacttccctacgctggcattatccagatcaggtggtacgggtatttctcagccttcacaaagaagggcaccccgagtcgtcaagccccaccgtgttaagcggggtttcgctattaagcatactgtctgcgccagacaatgtaaatttacagccagccgcggacgataatttcagcgttatcagatagttctcaaaacctattcggttctggcaaacttgctggcggatatgttgctgcacgacgctttcgtttacactttttacgaaaaggggcgtgagataacaaaatagcgcttgtcagatacgccaccagcagaaatgatacacacgatgttaactgacccgcatatgtggagggtaaaaatatgaaaagtaagttgctgccttgcgcgctgttgcttgcaaccagttttgcatgggccgcccccgcgacaacgggcattgatcaatatgagttaaaaagctttatcgccgacttcacccacttcaagcccggcgataccgttccgcaaatgtaccgcaccgatgagtataatattaaacagtggaaattacgtaatctgcccgcgccagatgccggtactcactggacctatatgggcggcgcgtatgtactgattaacgataccgatggaaaaattatcaaagcctatgatggcgagattttttatcatcgataatgatatacgcactctttctataaagagtgcgtaccgcataaatttaattataagataccacgattaatgctttcgattgtaatggccccgctttaacttttgcaggatcgagaacataatatgtggcaaagacaggaatagcttccaccgaattcactgcgctgcctttggcataggttttgaaaatactatttatcgctactcctttgtttattttaagcaggctccgatttgaatctcttaagataaacccaacgccattatcgttatccggtttcaggactgcttcattctcatcccagactaaatcactacgtagatttaccgctatttgccgtgatgtcagcatcgcattccgcacctgatttttgcaatccagaataatatcaccctgcttagaaaactcactaacctctcctttagcacggagtttagtcataggcaccgggtccagtgtgatggtgagattctggggggcgcaggtagtttctttacggttgtaatttatcgttaaactggctttataaacgcctttcccattcagatcagtgataacgtttgcaacacactctctattcccccaacagccaatatatcttaaaataaataccacccaatcgctactgctccattgattctttgcacccgacatcaccgttatattatctatcgtaaccgagtacccccccctggcagacacagtcaccgcctccagtgagtttatttctgaaatcgttatcttatagggggcttcaattacaccgttttgattgcgcatatttatcgcactactgctctgccattcaacttttaactttaacttaacactgtcattcggtcccataccgataatatgatcggatgtctctaatttagtcacaacatcactattagaacaattggcatctgtgaaaccatttgtaataatggctgactcctccccccccagcattaagctgtcggattgaatcgtataatccttcgtgttggttaaggtcgcattacacgccgcgtaacccaactgcgtaaactgcatcatcattaataaaaatagtagtcttttcatggcgtcacctaaagattaccgacaaatataaacgttattttcatcaatctgtttatcaaaagtgatcttacagaaaagaccctgttgtttatctgttgcgatttttaccgaaatgggaaccttttcagtacgaataaatacccggctcccctgacctaccagtcctacattatttccctcgtcatcttccacttcataaccaaatgttaaaggctcgccatctgcgcgccgcgccaggaaataaaaaggtttactggtctctgtttcaaaatgaaccaatactacggctccgcgataaggcactgtaacttttcgatttcccaacagggcgacatcgctttcactctcagagacatcaagagagataaaattttgccggtatggcgtcaatgcttcaaatacggcataaccttttgcattggtacgtaaatagggacgcccctgcaccgccgcgccttccaggtacggcgcgttaataatcgcgatagtatcattaaggcgagaggctaaatgcacgccatcggcccatgcaaccagccctccctgaatatttccgcccacctgatggtatttattggactggctgtaactgccgccgactgtcgccagcggggcgttccaggttaccgatcccccgaatgtcgtttggtgttcctgtcgctgctggctgaggttagtcgtataattaaactgatcgcgattaccgaacgtgccgctaaggctggtgttattcgcctcataaccttgatcgtcaaaggtggtggaattcgataaatggatatcacgatttcccccattctcctttaatccccatgttaagggaatcgataaatagatattaaagcgcttatcttcacggttattgctgtcatacgtctgagttgccgatagcgtaaaactgagccgctgccaggtattactgtagcttaactgataatcctttcccgtgccgctacgcccccaatagtcgcgccacagagcgctggcagtaaaatatccccacccatcgggtaacgtctgattaatattgagagtgaaagtatttttacgcccaaagtcattctcataataatcagcaatatcataaatatcgtcatcatcgcgacgatagttatcccggttattagcccagacatgatcgttaaaagtgcgataatcacgtgatgagtagcgatacgctgccagagaaaaatgggtggccgattgcgggagatatttattccaggcaacctggtagctttccccatcaaaaacatcgccattatcctgcttgctatgagacaacgtaccgtcgacagataccgcgccaatcagcgtgttccatccggtgccaagggtaaatgagcgataatcgctggctaacatcgttccgccatacaacgttagcaggttattgaccccgtactgataggttccctggagaaaatcagtttgctgagaggctccttcaattctgcttcgtccggcggcgaaatcatattttgctacgccgggctgcaccatattgggaacggaagaatacggaacaataaaccgtgaaacagtaccgtcagcctctttaacgctcacgtccagatcggctcccccccctgccagctgaagatcttcaaatacaaaggggccaggcggaacttctttttgataaacaatgaagccattctgttcaaccgtcaccagggcgttactttgcgccacgccacgcacaaccggagcgaaattttgcttagagtgcggcagcatttgcatatcacgccagaagcgcaccccgcgaaagcgcaccgtatcaaacatatccccgctggtgtactgttcccccagacgcattgtccccagtaccgccgggaaatcacgttccagatacagagtattgctctgccatttgccagctgaattttcacttttggaaaaattagcgttagaatgtaattgccatccaagcagattcaatccgctgacaaaatttgcgtaagtatttttctcactaccgccgcttttataatggctgtaatattcgctggcataatacgatgtataaaaagcgttaattccacggtcccatgtctctggagacgcatagcccgcttcatattccagcacataagcctgagggacgctcagataaaggttaaaagcggcagtgtcataagaaacactacctccatgaaccaccgttttcagcgcaatacattcattttctactgttgtactctgcggggtaaatttaattcccaggctggcgatcaggtccggagaaatacaggtgctatcggggtcatcctgaatattaacctcataagttccacgccattctttattgacataaacgtccatttcataaacgccagccatgggtttggtgctatcaatctgataacgagacaccttttcacctttcaacccaccgaacataaagttagtatcgaatgtttcttcttcagcccaggcgggtgaaataagtaatgctgcaaaaagtgacagcgtgatggcgtttaacttttccattatctatccttaggtggattccccgcttttaattttctattttgacagtctcgtttaaataattaccagaatcatcaattagcgtcacggtatagctatttacgactaccgttgtggtgatactctgcgatgaccatggagccagtaataaggtttctttatttactttactttttgctttaatttctggaatagtgatccagtttgcggaattatttttcacgctaatactccctggcgcacgaagcaactgcaagcgggaaaatgttgctttatcgactttctgtacccccggtgggcgatagatcaactttatccggttttgtagcgcaaatttaatgatatttttatctttgttctcgtctgaatttggtggaatatccaatacattgaggtagaaaagactttcacgatcgccaggcaaattattagcgagcttctttatttttaattgctgacctgaatttgccgcaactctaattacagggggggtcataataaatggaacctgtaatttttctggcggcaggctggtatcaccgttatcaatccacgcctggatgagtgaacttcgtttaccgtcattcattaattgtacggtaatatcttttttctgcgccggataaataatacgtgtaccatatatataaatgccgctccacgcaggcatagcggcacaagccaggcataatgcaatcatccatttcatggccgataaccttataaaagagatacaagcggctaaaagcttagccgccaaaaaacgattgttaatcagttaataccgtcatcgtcagtacagattcaacagaacctggtgttacagtattttcaacggcggcatagcgggcagaaaagttcagggtatatacaccattttcaaacttacttgaattcagagtgtaattccccgcctcatccggtttcacctgaataccatcaagataaacagcgaagcccgcaccattattagtagcattatttttggtgatttgcatgttatccacaaattgagaacggttaaaactaattcgtggattagctgtattcgtacatcttacttttaaaatcgcttctgggctagtgtatcctgtatatatatcgccagggtttaagtcagtcaatctatcaacacctacctgggataattcaatagtcgcgctatttgcaccttcgaaagtacaggatgttcccaccacttctccgtttatttttaattcccccatatcttcatcagcagcaaaaaccccagcgctcataaatacagcagacaatacagaagcagcaataagtgaacgtttcataatctcttccttaatgaagtaatttctatttgttaagagttattaacccttgcaacgaaaattctcatagacaggaagttatcgcaatgtaaacacgatgttttgttgatttaaaacaatttacagattgcaatataattgcaacaaataatcattgcttatcattattttgtaaacttattaatttccgaaatttactgcccttaaacataaacacaacaaataaaaaagcccatatcattgatatcaatgatatgggcctgcggaattaataagaattagtcgtaatgattaacaacaatctgtcgggtgctatcaccaggcaccgtgtatagctgcgttgtcacacctctcatcggcgtagcggcgggtgtttgcagagttgaaacgtggatagtgttgccgcaacgctgctgcaactgtgcgtttaccacttctgtactgcacgttggcgcggtcacttttccactgatggttaatgttgcggtgtcggaggcaaaaacgggtacgcttatcccataagccgaaactataattcccatcagcaaatattttttcatagtgagtaattgttcctctggtgaacgtcaaacagtatgcaggccgtcctgatgagcagtatgaacgtatcgataccttaaaaccaattgaaaaaataaatcagtaggataggtatgatcaattcaaataatgtttttgccgattatttcagataaacacctgtctgtttaagcaggaattaacaatgcgggggctattattttattaatacattcactgcatcaatatatattaatgcagtgaatgtcatattctctttggaatacgtcaggaggattacaccgcgcggaaggcgatttcacccggaatcacttcaccctgccagtaaagctgtgccgcaacgcgatcggccagttcgcgatagatcgcggtaaattcgctctccggacggctaaccaccgtcggcgtaccacgatcgagatcttcgcgcagactaatatgcagcggcatctgacccagaagctgagtatggtatttttccgccagcttctgcgcgccgcccgtgccgaagatcggttcgtgatggccgcagttgctacaaatatgcatactcatattttccacaatgccgagcaccggcacttccaccttctcgaacatcacgataccttttttggcgtcgatcagcgcgatatcctgcggcgtagtcaccaccaccgcgccggtaacaggaatgttctgcgccagcgttagctgaatatccccggttcccggcggcatatccagtaccagataatccagatccggccacagcgtctcctgcaacatctgcatcagcgccttactggccattgggccgcgccataccatcgcgttatcgtcagtcaccagatagccgatcgagttggtcgccaggccgtgagacataatcggcgccatatgcgtaccgtctggcgatgtcgggcgctgatcttctgcgccaagcatggttgggatcgacggaccgtaaatatcggcatcgagaaccccgacctttgcgccttcagccgctaacgccagcgccaggtttaccgccgtggacgatttccccaccccgcctttaccggagctcacggcaatgatgtttttcacgccattaatgccaggctgatttttgacgcgtttcagcgtcgcaatgttgtacgacagtttccagtcgatcgcttttgcgcccgtaatacgtaacagatcggcgctgcattgctcttttaatacctcaaacgcgctgttccagacgaacggcatgaccagctcaacgtgcagcgtatcatccatccaggcgacgtggtgcaacgccttaagcgtggtgaggttatgcttcagggttgggtgctgaaaattcgccagcgtcccggcgaccatcgctcgcagggtatctggtgatttggcctgggattgttcgttcatcccgactccttttgtagttctgaaaagtacgattgtaactttgtagtttactccagcggtaacaattattcatttacggataaatgcccttatcgattggcgcagtaattaccattttggtactatcaaagcccttttttacaacagaagaagtaatacccactatgactcaagtcgcgaagaaaattctggtaacgtgcgcgctgccgtacgccaacggctctatccacctcggccatatgctggagcacatccaggctgatgtctgggtccgttaccagcgaatgcgcggccatgaggttaacttcatctgtgccgatgacgctcatggcacgccgatcatgctgaaagcgcagcagcttggtattacgccggagcaaatgatcggtgaaatgagccaggagcaccagaccgatttcgccggttttaatattagctacgacaactaccactcaacgcacagcgacgagaatcgcgagctgtccgagctgatttatacgcgcctgaaagagaacggttttattaagaaccgcactatctctcaactctacgatccggaaaaaggcatgttcctgccggaccgatttgtgaaaggcacctgcccgaaatgtaaatccgcggaccagtacggcgataactgtgaagtctgcggcgcaacttacagcccgaccgaacttatcgagccgaaatccgtggtgtccggcgcgacgccggtaatgcgtgactccgagcactttttctttgatctgccgtcattcagcgaaatgctgcaggcgtggacccgcagcggcgcgctgcaggagcaggtggcgaacaaaatgcaggagtggtttgaatccggcctgcaacagtgggacatttcccgcgacgcgccgtattttggtttcgaaatcccgaacgcgccgggcaaatatttctacgtctggctggacgcgccgattggctatatgggctccttcaaaaatctgtgcgataagcgcggtgacacgaccagttttgatgagtactggaaaaaagactccgacgccgagctgtatcactttatcggcaaagacatcgtctatttccacagcctgttctggcctgccatgctggaaggcagccacttccgtaagccgaccaacctgttcgttcacggttacgtgacggtgaacggcgcgaagatgtctaagtctcgcggcacctttattaaggccagcacctggctgaaacactttgacgccgacagcctgcgctactactacaccgcgaagctttcttcacgcattgatgacatcgacctgaacctggaagactttgtccagcgcgtcaatgccgatatcgtcaataaagtagtcaacctggcatcccgtaacgccggttttatcaataagcgtttcgacggcgtgctggcggctgaactggccgatccgcaattgtacaaaacctttactgacgccgctgcggtgattggcgaagcatgggaaagccgtgaattcggcaaagctatccgtgagattatggcgctggccgacgtcgctaaccgttatgttgacgagcaagcgccgtgggtggtggctaaacaggaaggccgcgacgctgacctgcaggccatttgctcgatgggcatcaacctgttccgcgtgctgatgacgtatctgaaaccggtactgccgacgctttctgaacgcgttgaagccttcctgaacagcgaactgaactgggatgccatcgaacagccgctgctcagtcacaaggtcaacacctttaaggcgctctacaatcgcatcgacatgaagcaagttgaagcgctggttgaagcgtctaaagaagaggtgaaagccgcagccgcaccggttaccggcccgttagccgacttcccgattcaggaaaccatcacctttgacgatttcgccaaaattgacctgcgcgtagcattgattgaaaacgctgagttcgtggaaggctccgacaaattgctgcgtctgacgctggatctgggcggcgagaagcgtaacgtcttctccggcattcgttccgcctacccggacccgcaggcgctgatcggccgccagacggtaatggtcgccaacctcgcgccgcgcaaaatgcgctttggcgtctccgagggaatggtgatggccgcaggccctggcgggaaagatatcttcctgttaagccctgatgacggcgcgaagcctggccaacaggtgaaataagcaacaagccggagcatgctccggcttttttaaccgcttaatcctgactggcatatcgcctcctccgcacgttttaactttttccttaataagcaatagcgctaagactccatatccggactgctaaataacggctaaaagtcatattctatctctccctgatacattgctattactgggttaaattaattcattgaaattattttaaaagcccaattattatataaaatggagttttagatgaaaatttctggcaagttattgtccacggctttggcttccgtactggtgttctctcttgctggctgtggcgataaagaagaatcaaagacctttaacgcaaacctggcggggacagaaatttcaattacttacacctataaaggtgacaaaatcattaagcagacgtctgaaagtaaaatcagctatgccactgtaggcgctaaaacgaaagaagatgccgccaaaattctcgatccgctgagcgcgaaatataaaaatatcgccggagtggaagaaaaattaacctatgaagatacctatgcccaggaaaacgtctctgtggatatggaaaaagtggactttaaagcgttacagcaaatctcagggacgatggtgtccggcgataccagcaaaggtatcagcatgaaacaaacccagacgctgctggaagctgctggttttaaagaagcgaaataactggcaggcataatgtattgcatcgactggtaaagtcgctcagggcgctgcttcggcagcgtcttttctttatgaattccgaaaaaagacagcctcgctgtaagtcccctcgccaaagcctataatccctgaattcctggccacaccaatacttaacgacaaggaattgttatgcaggttctacgtcttatggcactgccactattcgcgctctctctatcggttagcataactggctgcgatcagaaaaacgatactctccagggaaagcaaaataacatgacagcgtttatcaagaagatagccgctagcaaagagtcagaggaaacacaacgctatgtaggtaatctcaacggtattgaaatcaagttaacctattactacaaaggggatatcgttttacgtcaaatatctgaacataaactactttataagaccctgaaagccaataataaagaagaagcacaaaaaatgctgagtcaagtcggcgaagcttatcagggtatgccgggtttgactgaacgaatcgactattatgatagctatgctacggaatatgtggatattgattttacccaggcaaaaataagcgacctctgtaaattgccaggatcatcaattgacaactgttccgcgtactatctgtcaatgattcgctcgcagaaactgttggaagagagcgggtatcatagaatcaattagtataataatgcgttttcccggtcagacaggacgctgccgggaacaataccgcagaattacttcgccgcgtgttcacgggccgccagaccgcgcagaaaataacgcataaactgatcgccgcattcgcggaagttcttatggtccggcgcgcgcatcatcgcggtgatctctgacattgagacacgaaacaactgaccggtaagtatcgccaggatatcatctgtttttagcgaaaaggcaatacgcagctttttcagcacaatattgttgttgatacgacgttccgccgtcaatgcaggcgccgcctcatctttgccgcgtttttcataaatgaggccattgagaaatgaggacaacacgatatccgggcaacgctgaaacccctcttcctcttctttgcgcaaccagattgctatctgctccggcgtagcatcaacgttacccagcgccaggatacgcgccagatcggtattattagcttttaaaatgtagcgcacgctacgcagaatatcgttactcagcatgaggccttcggtcgtttctatggcaaaacgatattctaacagtcttttacaggccaatcgcctcttttaaacttttcagatagcgacggcttaccggcaccgtcaggccgttgcgtaaaatcagctctgcctgcccattatcctccagccgaatttcctgcaaatgggccatattcaccagaaactgacgatgacaacgcagtagcggcgtccggctttccagcgtgcgcagcgtcagctcggtaaacccctctttcccttcactgctggtcacataaacgccgctcatacggctactgacaaaggcgacatcatccatttgcaacaaatagatccggctgtgtccggtacagggaatgaatttaagcgcctgctggttttccggcaacaacgaaacatcctgtttactgcgctcctgacgcagacgatgtaacgttttttccagccgtttctcctctatcggcttgagcagataatcaaaagcgtgttcttcaaaggctttgatggcgtattcgtcaaacgcggttaaaaaaacgatatacgggcggtgttccggatcaagcattcctaccatctccagtccactgatacgcggcatctgaatatccagaaacagcacatcaggtcgcaacttatgtaccgcgccaatcgcttctaccgcgttcgcgcactctcccacaatctcaatgtcatcctgcccctggagcaaaatccgcagattttcccgcgctaacggctcatcatccacaatcagcactttaatcatgcgtcctcctccagtggaagtcgtaatgtaattcgggtaaaacagtccggctcgcaggccacgctaataccataatcatcgccaaagtgttcgcgcagacgtttatcaaccagactcatccccagcccgctactgccggcggaaggctgatacagtcccgcattatcctcaatatctaacatcaaatgctgcccttcgcgccgggcgcgaatagcgacgttgccggtatcaagcagttgcgacgtgccatgtttaatggcgttctcaacaatcggctgtaatgtaaacgcaggcaatttctgacgtgaaagcgtcgatggaacatcaagctgtacctgcagacgcgactgaaaacgcgctttttcaatttgcagataagcgtttacgtgttcaatttcatccgccagcgtgacgatttccgacgggcgttttaaatttttgcgaaaaaaggtcgacaagtactgcaccagttggctggcctgttcgctgtcgcggcgaatcaccgctttaatggtattgagcgcgttaaacagaaaatgcgggttcacctgcgcgtgcaacagcttgatctctgactgcgtcagcaacgccttctgccgttcatactgcccggccaggatctgcgcggataaaagctgcgcaataccctctcccagggtgcggttaattgagctaaacagccggtttttcgcttcgtacaatttaatggtgcccatgactcgctgattttcgccacgcagcgggatcaccagcgtcgagccgagtttacactgcgggtgtagcgaacagcgatacggcacttcgttgccatcggcataaaccacctctccggtttcaattgctttcagcgtataacctgatgaaatgggtttgcccggtagatggtgatcgtcgccaataccagtaaaagccagcagtttttcgcgatcggtgatggcgacggcgccaatatccagctcctgatataacacctgcgccaccttcatactgttcacttcgttaaatccctgacgcagaatcccctccgttgacgcggcgaccttcagcgcggtagcagaaaatgccgaagtatatttttcgaacatggcgcgcttatcgagcaaaatacgcatgaacagcgcggcgccaacggtattcgtcaccatcatcggcgcggcaatattactgaccagatgcaaggcatcgtcaaacggcctggctatcagtaaaatgatcagcatctgcaccagttcggcaatacacgtaattgctcccgccgtcagcgggctaaacactttgtccgggcgtccgcgacgtatgagaacgctgtgtaccaacccgcccagcagcccttcgacgatggtggaaatcatacagctcagcgccgtcatgccgcccatagaataccgatgtaacccaccggtcagaccgaccagcccgccgacgaccggcccgccgagtaggccgcccatcaccgcgccaattgcgcgggtattggcaatcgaatcttcgatatgcagcccaaaataagtgcccatgatgcagaagatagaaaacgtgacgtaacacagaagcttgtgcggcagacgaaccgtgacctgcataagcgggatgaacagacgcgttttactcattagccacgcaatgaccagaaacacgcacatctgctgaagcagcagcaacaccagattaaactcgtacatacccgcaaaccacacttcaattaaaagcgcgtaacatacattgagtacgattaactttctttgaactgttgcataaaaatatgaattcgtgaatacgatcacttaaacaccccgccgcaacccgctacttcgcgttttaatgcataaaaaacaggcaaaacttcctggttcgtaaaagagcgtctaaagttaaaccgggacctcgcgagcaagggtgaaacgatggcgctttacacaattggtgaagtggctttgctttgtgatatcaatcctgtcacgttgcgcgcgtggcagagacgttatggacttttaaaaccacagcgaacggatggcggtcatcgtctgtttaacgatgccgatatcgacagaatccgcgaaatcaagcgctggataaataacggcgtccaggtcagcaaagtcaaagtgctgctcagtagcgacagtagcgaacaacctaacggctggcgcgaacagcaggagatcctgctgcactacctgcaaagcagtaatctgcacagtttacggttatgggtcaaagaacgctgtcaggattatccagcccaaacattgaccactaacctgttcgtcccgctgcggcgacgattacagtgccaacaacctgcccttcaggcgctgctcggcattcttgacggtatcctgatcaactatattgcgctctgcctggcgtctgcgcgtaagaaacagggaaaagatgcgttggtgatcggctggaatatccatgataccacccgcctgtggctggaaggttgggtcgccagccaacagggatggcgaatcgacgtgctggcgcattcgcttagccagttccgcccggaactgtttgacggcaagacgttactggtatggtgcggagaaaaccagacgctggcgcagcagcagcaactcctggcatggcgcgcccagggacgcgacattcatccccttggcgtttaaacagcagctaacaaattcgctttaatgtatactccttttattaacataaggagtacataatgcgcgtagcgaaaatcggggtgatcgcccttttcctgctgatggctattggcggtatcggcggcgtgatgctggcaggttacagttttattttgcgtgccgggtaagcgcgcgcgtcagcctttcaaacaggcgatcgataatgatcgccgccagcgccaccagcagcgccccctggataacataggccgtattaaagccgctaagcccgataatgatcggcgtgcctaacgtactggcccccactgttgaagcgatggtcgccgtaccaatattgataatcaccgaggttcggatgcccgccagaatcaccggcgcggccagcggcagttcaacctgatacaactgttggcgacggctcattcccataccgctggcaacgctcatcacgctggcaggcaccgcgcccagcccggccagggtcgcctgcaggatgggcaacactccatacaggatcaaggcgataatggctggttgctgaccaaaacccatgacgggtaccgcgatcgccagtaccgcgaccgggggaaaggtctgcccgacggcggcgatagtctccaccaggggacgaaactccttcccactttctcgcgtgaccgcaatccctgcgccgacgcccaccacgacggcaaacagacttgagatgcccaccaaccagaaatgggcgagcgcgagggcggcaaaactctcctgttggtagaccgggcgcggtaaatcgggaaacagcgcggcgaagaacggctggctataaggcaatccaaacagcagaagcaagaacagaacaataagccagagaagcggatcacacagtcgtttcacggggggacgtctccgaaagtagatcgcggaaatggagcgtaccgcagggctcgccctgctgattcgccaccggcaggacgtcgcaccgacgggcgacaaacatcgatagcgcatcgcgtagcgtcatctcttccaccagcgcgtcgccgctgagctgttcatgccgacgtacataatcgcctacgctacgtaacgaaagcagccttacgcccagctcgctgcggccaaaaaacgcctgcacgaaatcattttccggcgaggtcagcatagaaagtggcgatccctgttggataacattgcccccgtccatcagcaccagatggtcggcgaggcgtagcgcctcgtcgatgtcgtgcgtcaccagtacgatggtgcgccccagtagctgatgaatgcgggtcatctcctgctgcaatgcgccgcgcgttaccggatcaagcgcgccgaaaggctcgtccatcagcaatacctgcggatcggcagccagcgcccgcgcaacgccgacccgctgctgttgcccgccggaaagctgatgcggataacgatcgcgcagcgcgctttccagacccaataatgccatcagttcatcaatacgatcgttaatccgcgcacgcgaccacttttgtagttgcggtacggtggcgatattttgcgccaccgtccagtggggaaaaagaccgatagactgaatggcatagcccatgcgacggcgcagttcaagcaccggcaggctgcggatctcttccccggcaaaacggatcgttccgctatcatgctctaccagccggttaatcatcttcagagtggtcgattttcccgaaccggaggtgccaattaacaccgaaaagctgccttcgctaaagtgcaaattgaggtcgctaacagcctgttgatcgccgaaggttttactgacatggttaaattcaatcatcggttgctcccttcaaaaacgcgatccataaatcaaacagcgcgtcgatcactaccgccagcgcaatcaccggaatgacgcccaacaggactaaatcaatggcgctgctcaatagcccctgaaacaccagcgcgccgaaacctcccgcgccaatcagcgcggcgacgacggccattcccactgtctgaaccattactacccgcaggctacgtaaaaagaccggcagcgccagcggcagttgcacatgcctgaagcgctggccgctactcattcccattgctcttgcgctctccagcacatcgcgcggcacctgattgagcccggcgaccacgccgcgcaccagcggcaataacgcatagagcaccagcgctatcagtgcaggcgtcatgccggttcccgcgacgccgaattcggcaagccacggaaactgtttcaccagcccggccaacggcgcaatcagcaggccaaacagcgcgacggaagggatagtctggatcacattcagcacggtaaacaccggcccctggcgtgaggcggaaaaataacaccagacgcccaacggtagtccgatcgccaacgccggcagcaccgtgcccgccagtaacatcaaatgttgcaccagcgcggcatcgaaaacatcctggcggttggtatactctttcagaagcgagaggttgtcgaacgtgcctgaaaacagcagcaccagcgggacaatgacaatttgcgcgtgcagcaaccagcgccacagcggcccagtggtaatacggcggatcgcatcgctacaggccagcagcatcagaccgaggcccagccacaatccacttcccagactggtacgcgccagcgggctgccctcctgcgccaattgggtcgccaccctgccgactccccacagcatgacaataaaaagcgtctgcgccatcatcagcgtcagtacgctaccgcgtttaccgggtacaaagcacaacgtaaacagcgcgcatcccgcgccagtcagcatccagatggtcgccggccagatctcccataactggcgcccctcgccgctcaccagacgattcggggcgtaattaatgaaaggcagcgcgacagcaagcagggtcagaacaaccaacagcaacagcacacgattaaccgtgatttttttggcagcatcactcacagattacttcacccaccctttttgtcggaggtaatctgcggcgacttttttcgcatccagcccttctacggcgattctggcgttcaactgttgcagcgttttctcatcaaggctggcgaaaacgggctgcagccagtcggctatctgcggataggcctgtaacaccgattcacgcactaccggcgcgggcgcatagataggctggacgcctttcgggtcgctcagggtttgcagacccagcgcggcgacagggccgtcggtgccatacgccatcgcggcgttaacgccggatgtttgttgcgcggcggctttgatcgtgaccgccgtatcgccgcccgccagcgacaagagctggttctgattcaaggtaaaatcataggctttttcaaatgccggcagcgcatccgcccgttcgataaattccgcagacgccgccagtttaaaagtgccgccctctttcagataacggctgagatcggcaagcgaggagagtttatttttttccgcgatgtcctggcgtaccgcgatggtccaggtgttatttgccggcgcaggcgtcaaccagaccagcttattctgctccgcatccagttttttgactttctcaaagccttgctttgcatttttccatgccggatcgttttcatctttaaaaaagaacgccccgttaccggtgtattccggatagatatccagctctccggcggtaatcgcgccacgaacgactggcgtcgtcccgagctgaattttattgaccgttttaacgccgtggctttccagtacctgcaaaatcatgttgccgagcagtgcgccttcggtatcaatctttgacccgaccgtcacgggcgatgccgcctgtagaggtaaactcaccgtcgccagcaacgccagcgaacttacccatagctttgagatcgtcatgatgctttcctcatccttttacggcctttttcagagacttgagaaaaaagcatagttgaaaagtctgcgtttaacctgggattttccggcagtttaagtgacgtggcaggcaataaaaggggggacagaaaaagtcattgccagacagggcgcagctatcgcgccctgttgacggcaggcttacagtagctcgaacgatccttgtttaacgcgagcggaatccacgccgataaagacgttgaacttgccgggttccgcgtcatatttcatctgctgattccagaacttcaacgcctcgatatcaatcgggaaactcacggttttacgttcgccgggcttgagggtgattttttcaaagccttttaattgcttcaccgggcggctcatcgacgccgtgacatcctgtaagtacatctggatgaccgtggccccttcgcgtttaccggtgttcgtgacctctacgctggccgtgactttgccgtcgcgttgcattgtcggtgaggagagcgtgacgtcagacaccgtaaatgtggtgtagctcagaccgtaaccaaacggatagagcgggccattcgcttcgtcaaaatagcgtgaggtgtatttgtttggcttttcaggattatacgggcgtcccgtattgagatggctgtaatagaccggaatttgtcccaccgaacgcgggaaggagatcggcagtttgcctgacgggttgtaatcgccaaacagcacatcggcaatggcgttgccgccttccgtcccggcaaaccaggtctccagaatcgcatcggcctgttgatcttcttttaccagcgccagcggtctgccgttcattaataccagtaccagcggcttaccggtggctttcagagcggtgattaagtcgcgctgactctgcggaatggtgatattggtacgactggaggcttcatgcgccatcccctgcgactcgcctaccactgcgaccactacatcggcctgtttcgccgcctgcaccgcctcatcaatcatcgcctgcggtgagcgcggatcgattttcaccgcctcttcatacaggtttaagaaatcgacgatatctttatcgttagtgatattcgcccctttggcatagaggatcttcgccccgtcgtcgacggcattttgaatacccgccagcaccgtcactgactgattcgcgaccccagcagcagaccagcttcccattacatcacgttgactgtcggccagcggcccaacaacggcaatggtgcccgattttttcagcggcagcgtttccagccggtttttcagcagtaccacactttcccgcgccacttcccgtgcctctttacgatgcaggcggctttcggcattggtgtccaccgggtcgctctctttcggtcccagatggctataggggtcgttaaacaatcccatgtcatattttacgttgagcacatggcgcgtcgcgtcgtccagttccgccatcgtcactttgcccgacttaatcagacccggcagatatttgctgtaatactcatccgccatgctcatatccacccctgcctttagcgccacgcgcaccgcatcttccgggtcggccgcggtaccgtgtttaatcagttctttaatagcgccgtggtcggaaacggtaattcccttaaagccccactcatcgcgcaggacatctttcaatagccaggaatctgacgtcgctggcgtgccgttcagcgagttcagcgccaccatcaccgcgccgctccccgcatccagccccgctttgtacggcggcatgtagtcattaaacagacgctgggaactcatatccacggtgttgtattctttaccgccttcaacggcgccataggcggcaaaatgtttcacgctggtcatcaccgaatagcggtccgccgggcttttgccctgcatcgctttcaccatggtttcgcccatgatagaggttaaatatgtatcttcgccaaagccttcggaggcgcgtccccaacgcggatcgcgggagacatccaccatcggcgcccaggtcatattcagaccgtcgtccgccgcttcatacgccgatacgcgtcctacggttcttaccgcatccagattaaaagaagaagccagaccgaggcttatcgggaagacggttcgctggccgtgtaccacgtcataggcaaaaaagagaggaattttcaggcggctcaatgccatcacctgatcctgcatttgacggatatcctggcgggtgacggtattgaaaatcgcccctacctgcccgtctttgatcatctcgcgaatcgcttctttcgggttatcagggccgacgctaatcagacgtaactgaccaattttttcatcgacagtcattttcttgagtaaatccgtgacgaacgcgtcgcgcgcttcgggcgtcagcgggtgattgccaaacaggttttccgccaatgctggctgcatcgccagactcacagcaacacctactgaacataaccatttcatgttgagtctctctttatctttatcccgacgaggcggtaaaaacagaataaaaaccgcagtttgccataagcctaaacgcgagaggagaagaaagcgaaggttattctcctaattttccacacagtcgaatacgcaaccgccagcaaatggtatcaaggcggcaaatgaataccaccaacacagagacaatttgaatgagaaagcgtattgtcataccaagcgctatgcttaacgctgatattttgtcccaccacaaggagtggagaatgtcttccataacaatgactgataataaaacgttcctgaatgagctggcccgcctggtaggccattctcacctgctgacagaccccgccaaaaccgcccgctatcgcaagggtttccgttccggtcagggcgacgcgctggccgttgttttcccgggttcgttactggaactgtggcgcgtgctcaacgcctgcgttaacgctgacaaaattattctgatgcaggccgccaacaccggtctgacggaaggctccacgccgaacggcaacgactacgatcgcgatattgtgattatcagcacccagcgactggataagctgcacttactggataacggccaacaggttctggcctggcccggtacgacgctctatgcgctggaaaaagcgcttaaaccgctgggccgtgaaccgcactcggtgattggttcgtcgtgcatcggcgcgtcggtcatcggcggtatctgtaataactccggcggctcgctggtgcagcgcggcccggcctataccgagatgtcgctttttgcccgtattgacgaccaaggcaaactgcaactggtcaatcatctgggtatcgatcttgggcatacgccggagcagatcctgagcaagctggatgacgaacggattaaagatgaggatgtgcgccacgatggtcgtcatgcgcacgatcacgactacgtgacgcgggtacgagatatcaacgccgatacgcccgcccgctataacgccgacccggaccgtttgtttgaatcttccggctgcgccggaaaactggcggtttttgccgttcgccttgatacctttgcagcggaaaaaaatcagcaggttttttatatcggcaccaatcagcccgcggtactgactgaaatccgtcggcatattctggcgaacttcgacaatctgccagtggcgggagaatatatgcatcgcgatatctacgatattgcggagcagtacggtaaagatacctttctgatgatcgataaactcggcaccgacaagatgccattctttttcacgctaaaaggccgaaccgatgcgatgctggaaaaagtaaaatttttccgtccgcatttcaccgaccgcgcgatgcagaaattcggccatctgtttcccagccatctgccgccgcgaatgaaaaactggcgcgataaatatgagcatcatctgctgttaaaaatggcgggagacggcgtcgcagaagcgcaacgctggctgaatgaattttttaaatccgctgagggcggtttcttcacctgtacgccggaagaaggcagcaaagccttcctgcaccgcttcgccgctgctggcgcggcgattcgttatcaggccgtacacgctgatgaagtggaagatatcctggcgctggatatcgctctgcgccgcaacgataccgactggttcgagcatctgccgccggaaatcgacagccaactggtacataaactctattacggccactttatgtgccacgtttttcatcaggactatatcgtgaagaaaggcgtcgacgtccacgcgctgaaagcgcaaatgctggagctgttgcaggcgcggggggcacaatacccggcggagcacaacgttggacatctgtataaagcgccggaaacgctgacgcgtttttatcggcaaaatgacccaaccaacagtatgaaccccggtatcggcaaaacgagtaagcggaaattctggcaggaaaatacgcccgacgaaacgcattaacaccgagtggtttaccgtgaatgcccggcggcgcgatgcctgccgggcctgcggcgacttaatcgttctgtgcggtttgcgctccggcgctggcgctggctgccgccatttgcgcggctttttgctttttatagctcagcgcggcagccggaacgggcatgactttaccggtttcaatccatgtacgcaggcgactggcgtccgcaaagtgagtatatttgccgaacgcgtccatgaccaccagcgcgaccggtttgttattgatcacggtacgcatcaccaggcaatgccccgccgcattagtaaagccggttttcgttaactggatattccagttatcacggtagaccaaatggttggtattgcgaaacggcagcgtatacgccggatgcgagaatgtcgccatgtcttcgcgcgtggtgcttagctggccaatcagcgggtattgcttcgtggcaatcagcaattttgttaaatcccgcgcggtcgagacgttatgaatcgacagccccgtcggctcaacgaagcgggtatgcgtcatgcccagcgctttcgccttcgcattcatcgctttaataaacgcgttataaccgccaggataatagtgcgccaggcttgccgccgcacggttttcggatgacatcaacgccagcagcaacatatttttgcggctaatttcgctgttcaggcgcacgcgggagtaaacccctttcatttccggcgtctggctgatatcgaccttcagtatttcatccagcggcaatcgcgcgtcgagcacgaccatcgctgtcattaatttggttatcgaggcaatcggacgcaccagatccgggtggttcgaatagatcactttattggtgttgagatcaacaatcattgcgctaccggaggcaatctcaggttgagacgccgcggttgtcgctgccgttttcgccacagcctgcggggcaaaaggaacggccaacatcagagcaaggctcaggaatgaagctcggaatttcagcatgatgagatttctgataatgattcacgcgcgtcgtaacgcacaccgcctgagctaagattatactcaagctagcagtggcatcatagcggcacgccagcgttgccgctacagaagaatcgtcagcaaatgctgcattgctggcttttgcgccagccctttttcgcatcagaacaggcggtagccgtatccccacaggatcacggtgatcgccagtagcacctccaggaccagtacgccgatagcgagcgtcgaactggagaagcttaatccttcctctctattaatgttaaggaaagtcggaatacccaaatacagcaaatagccggtgtaaaagagcgcgacagcgccgaccagtgcgcatagccataccaggggatagagcgccaccagaccacttaaaaacagcggcgtcgcgacatagccggcaaaaaccatacagcgcgcaagcgatggccgttgcggatagtttcgcgccatccaccagatgacgcgtcccatcaccgcgacgcccgccagcatcacgccgtagaacaagaccgccagcgcaaaagcggtaaacagcgagagttgtaacacgttgccgtcgccaaaattccagccgatttgcgtcgtgccgataaaggcgcagacgacgggaatcgccgccatcagcaaaacatggtgcgtatagtgatgcgaaacggtttcgttttcgcttttgatcacctgcatttcccgatcgggatgggaaaaaagcccccatacatggttcatactgcccccttctgctgcctcagatgccagtatgttcaagtataattcagtttctggttattttatgaacaatggcaaaatagtctccggcaaaacgtcggctttgccgcgcacgcctcttgccagggtgtatgcttaatgccggaggtggtttacgcatggatatcaacacgcttattacgcattatggctatgcggcgctggttatcggcagtatggccgaaggtgaaaccgttaccctgttggggggcgtcgcggcgcatcagggattactcaagtttccgctggtggcggcggccgtcgcgctgggagggatgatgggcgatcagctactttacctgttaggacgatgctatggcgggaagatcctgcgtcgtttcccgcgttatcatacgaagattcgtcgcgcgcagaaaatgatccaacgccatccgtatctgtttgtgatcggcacgcgttttatgtacggcttccgggtggttggcccgctgctgattggcgccagccgcctgccgcctaaaatttttctgccgctgaatattgtaggcgcgctgatctgggcgctgctgtttaccacgctgggatatcttggcggcgaggtgatcgcgccatggctgcacgacctcgatcagcatctcaggcacggggtctggctgattctggccatcgtcctggtggtgggcgtgcgctggtggctgaaaagacgcggcaaagcggaggcccgttaaacccgatggtatccggatggcataacgccgccatccggcacccggcgtttatttggcgttgaattgcggattcgccagcataaacccgccgtcgacaatcagcgactgaccggtggtatagcttgctccttccgaacacagccaggcgacgaggctggctatttcatgcgtagaacccggtcgggcgatagggatcgagggttccgatcccggctcaatgtcgctgtcatccatatcattcatcggcgtggcgatagcgcctggcgcgacggcgttgaccaaaatatgatgctcaatcagttccagcgccatggatttagtcaatccccccaacgcatgtttcgccgcggtataggcgctggcttgcggaagcggcgtatgctcatggacggaggtgatgttgataatgcgccctccctctccttgtttaatcatatgccgggcggcgatctgcgcgcagagaaacgcgccatcgacatccacggtaaaaatttgccgccactgcgtaaacggcatatcaataaacgcggatttggtcatcgccccggcattattgaccagcacgtcaacgcgccccaggcgctggataagatgttcaatgacctgcgcgccctcgggtaactggctcaggtcaagatgaatggtctctgcccgcacaccaaactgcgccgcttttttcgccgtctcctgcgcgccgcgttcatcggaatgccaggtgataccaatatcaaaaccgttttgtgctaataacaacgcacacgctttgccaattcccgaatctgatgccgttacaattgcgactttggtcatattcctctccggatgattcatacacagcctaagtataggaaccctgtctgaatcatccggaaaaatcaggaatgataaccgccgcccagcgcgctggtaagctgaatagaggcatccagccactggccctgcaacagcaagccgttacactgctcgcgcagtgccgggattttggcctcgctcacgcgggaacccgcaataatgccggcattaaagcgcgcttgcgccagaccgaccacacgctgcgcgtcatgctcaatctgctgctgatgctgatttttctgcgccagcgtctctacctgactggcggcgcgcgccacatcattaaccgcatctaccaccgctttgttgtagttggcgatagaaaggttgctttgcgctttggcgatatcgaggttggcattcagcctgccgctgtcgaaaatcggcagcgtcagcccgccggtaatgccatattgctgtgcggaatggcggaacagatcgctcagatgtaacgcatcctgctgtaaaaaagccatcagattgatatcgggataaaacgcggccttcgcggcgtcaatgctgctcaacgaggattcaatgtaccagtgcgcggcctgtagatccgcccggcgcgccagcaacgaataccccagttgcgacggtaactggctttcaacggcggggagactcacctgacgcagcttgagcgccgccgattgcgtattggttaacgcgctgagccgcgcttcaataaccttcattttaccgttaacgtcattcaactgctgctgggttttgctggcgtcgatatcggtctcgaccccttcaacagaagaagtaataccgtgttgatacaactcccggtttaccgccaccacgttttgctgctcatgctcgatttgcatcagcacatttttcagcgctgcctgtgtttgccactcccagtagagtcgcgccacgccgcttgccagcaattgtcgggtctgctcctgctccgcttcgcgcgctttgaccgccccgatccgcgcggtaacttcagcgcggtttttcccccataaatccagatcccagcccgccgtcaggccgaatgtaccgttggtataccacggcccggtcgttcccgccgcggggtcggtaatcgcgaatggccccatcagcccttccgcggacattcgctggcgctcaatgtcggcagaaaagtcgagctgcgggccgtcctgcgcctcaaccgctttcgcctgcgcttccgccagttgaatacgctgttcagccacctgcatatccggcgaatgctgtatggcattatcgatcagcgcgtcaagctgcgcatcgtgatacgccttccaccactggctatccggccaaccgtttttcaatgccgccggcaggctggaatcaacatgagaagagggcgtctgctgggtcagcgactggcgggtatcgtgcatgggggcgcaacccgccagcaaaataaaaagcggtaagctcgctgtcgcggcaaggaaagaattacgattcatggaggtgttctgataaaaaaaggtgcgcagagagtacgtcttacggcgatctattttttagttacgcgtggcaatacatcatcagacaacaaaagacatattttgaaatttatatgattagcaaataatttcatctgatacattttttgatgtaatacttcaatgaaaagtcccactaacccgttcataaatgaacgattttgctgcaatacgcgccagcagccttcatgagttaaacgtcgccgcgcccaacaaggcagcagatggcttaatactttcctatactttgtttgtatttaccaataaagggacaaacaatgaaaattcttctatgggcaatcttaattatttttctgattgggctgttggtggtaacgggcgtgtttaagatgattttctgattcctgcgccgggcagcgatagtatctgcccggcacacgttctggacgctgtagagattagattttaatagcctgaatcgcccgcgcaatctcggacgaacggtttaacgcccgaatcgactgaaaaagttctatcgcctcaatatattccttacgtaaatatcccaaccactgtttaatacgcgcgacatggtataaaccggtatcgccctgcttttccagtcgggtatatttttgtaataacgtcaccacttccggccacggcatacgcggttcgttatacttcaccacccgactcaggttaggaatatttaacgccccacggccaatcatcaccgcatcgcagccgctggtcgccatacatgcctgcgcgctctgccagtcccagatttcgccattcgcgataaccggaatagtcaaacgctggcgtatttcgccgatcgcctgccagtcgatatgctcggcgcggtagccctgcgctttggtacgaccatgcaccaccagttcactggcgccggcctgctgcaccgcatcggcgatttcaaattttctatcgccgctatcccagccgagacgcacttttaccgtcaccggcagatgcgacggtaccgcggcccgcatcgctttcgcgccctgatagatgagttcgggatctttgagcaatgtcgcgccgccgccgctgccgttcaccacttttgacggacagccgcagttcaggtccacgccatacgatcccaacgccgtcgcccgcgcggcgttttccgccagccactgcggatgctggcccagaagctgaatacgcaccggcgtgccggacggcgtgcggctggcgtgatgcaactccgggcagatgcgatgaaacacttttaccggcagcagctgatccaccacgcgcacaaattcggtgatgcagagatcgtaatcattcacttcggtcagcagctcgcgcactaacgcgtcgagcacgccttccatcggcgccagtaaaacacgcatatcggtatccacagcaaaaaaagaggcgctatcataacgcctctctgcgatgagcaaaactttttgccgggtggcggcgcaaacgctacgctacgtcacgtaaggcgctcaacgcggctcaagacagttatcttctttccagccgtacagccattcgataccgcgataaaacgcctcctgcgatttccctttccacagcagattacgcacctgacgctccaccccggcggcgtgatagagacgtcccatctcgcgggtagaccagacgatacgcgccgtgcggggaatacgcaccgactcatacagcgcaaatgcctgctgcgcgtcgccgtcgcagcgttccagcgctttgcccagcgtgacggcgtcttccagcgccatacaggcgccctgggccatatattgcgccaccggatgcgcggcgtcgcccaccagagtgatacgctcggttccccatttcgcgaccggctcgcgatcggcggtcgaccagcggcgccaggaggtcggcttatccagcatctggcgcgggcggggatgaatgccggcaaaataagagagcacctcttctttactgccgtctttcacgccccactcttcttgctggcggctgtggaatgtcaccaccagattgtactgttgacctccacggagcggataatggaccaggtgacaatgcgggcctgcccacagcaccggtgcgttaatacgtaaatcgtccggcatatcgtcgcaatcaatcaccgcccgataaactacatgccccgttacgcgcggcgcatcgccgagtaaactttgccgcacgaccgatttaacgccgtcgcagcccacgagaatatccgccgtccagctatttccctgctcatcaaacaccgtaacgtcatccggcgtctggcggatatcgacaatatgggtcgaggtacgatactccacgccagggtgcgtcagcaccgcttcccataccgttgcatgaatatctacccggtgaattaccgcatacggcccgccaaaatggtcgcggaacgcctgtccggtttcaatgcataccacttcttcggcattcacggcatccatcatggtaatgtgatcggtaaacaccgcacgctggcgggcaacatcgcccacaccgagactatccagcgccgaaaaagcgttcggcccaagctgaatacccgcgccaatctcgccaatttcgtgcgctttttccaacagcatgacttttattccctggcgcgccagggacagcgcggtcgccgcgccgccaattccgccacctacaataattgcgcttgtcacgtgagtcatggtcattctccttttcaggccgggattttatcttgttgattttccggcgcggcggcaataaacgccggtagctgtacgcaggcgtcataaacggctttacagcgcggatagcctgataaatcgcagcccatcctgagcgcattcgcccactgaggaatcaggcagcagtccgcaagtcctggcgcgtcgcccacgcagaatcgtccggactgacttttacgcaatagctgctctaccgcgcttaacccttgctgtatccagtgggcgtaccagcgttttttatcctcttcgctaaccttcagctcatcggtcaggtagcgcaacacgcgcatgttattgattgggtgtatatcgcaggcgatagcgtagacaatttccagcgcctggctgcgcgccgggtcgctcgtcggcagcagcggcgtttgcggaaaatgtcggtccagccagtcgacgatggccagcgattgccccaacgattcgccgtcatcagtgaccagcgtcggcaccaggcctaccggattcatccgtcggtaggccagcgcattctgctggccgatacgaatattgacgcccaccgtctggtaatcaatcccctttaacgccagcgcaatacgtacacgataagacgccgaactattaaagaaactgtacagcttcatcgttcacctcagacaattttcacagcaatcggcgtcagaccttctacgttcccggtgatgacatcccctttcaccacggcgcccaccccctctggcgtaccggtgaaaatcaaatcgcctggctgcaattcaaaaaagccggacaaatagctgatggtttcattcaccgaccaaatcaggtgacgaatatcgctgcgctgatggtcttcgccgttaacctgtagccaaataggggcgttatccacattatgcgtttcagcggctttgtgtaatggcgcaatgggcgcggagagatcgaacgctttgccgatttcccacgggcgtcccatctgacgcatttccatctgacgatcgcgacgcgtcatgtccagaccggtggcgtatccccagacatattcatgggctttttccagcggaatatcgctcccttttttaccaatcgccaccaccagctcaatttcataatggtagttatcagtctgcgccggatacggcagttctagggtatcccccgccgctaccgggacgacagcgtccgctggtttacaaaagaagaacggcggttcgcggtcgggatcaaagcccatttcacgggcatgggcggcatagttgcgacccacgcagtaaacgcgacgtaccggaaactgctcatcactgcccgccacgggtactgttaccggagcctgcggctggaatacatatttggtcatgttctctctccctaattaataacgtgcttcgcggaacagccccagggcttcctgaaccggcttgtccgaaaaactgaataacaccgtgtcttcgctgctgcgaaacgacacctcatgccaggtcggcgccacaaaaatgtcttttgcggaaaaatgaaaagtttcgttgccgatagtgacctgccctgccccttcaacgacgtggtagatagtgctgtcggtgctccgcgccacacgcgaggcaaagccttttggcagcagttgcaggaacgcgcccatcgacggcatcggataaccgccggtgacgggattaacgtaacgcagcttgtagccttcccactcatccggatcgcccatacgggtcagatcgtgcaacgcctcgcgactgcggtcgtaacggtagttgaaaatcggcgacgagttcccgcgctggtggcgcagcggcagcatattcgctgcatagcgcggcagataatcgccctcttttcgcgtcaccggctgctgatcttcgggatagtcttccgcaaacccacagcccaggaggttgactaacggcagatccagaccatccagccataccaccggctctgaccccggattaccatgatcgtgccagcgccactgcggcgtcaggataaaatcgccggtatgcattggcgtgcgctcgccgtccaccgcggtaaatgcgcctttaccttcgacgataaaacgcagcgccgactggttatggcgatgactcggcgcgacttcgccgggcaggatcagctgtaaaccagcgtataaggtcgccgtgatcgacgactgaccgcgcaatgccggattttccagcaccagcacccggcggatcgcctctttcgcgccaatgacattgccgctttccatcagtagcggacgaatttcctgataattccagtaggccggcgcgcagttggcgtttggcgtctgcggtaccaggtgatgtaacgattcccacagcggcgtcagattctgcccggaaatatgctggtaatactgctgacggctatcttttacgttctgatttatttcatacatggagattctccttattcgtttacgacgctggcacgcggcaggtcgtcaggtacagaaatcgaaaggcggacaaccaccgtcagcagggtaagcattaccgcgctgatagccgccggaatagcaatgacaaaaaacaacgtatcgaaagagaaattgagggccatcatcatgccgccggagagcgaaccgacaatcgccccgcagcgtccaatggcgttcgaccagctcacgcccgtcgcccggctttgggtggggtacagcgtcgccgtcagagcattaagcccgacctgtgaaccgctaataccgatgccggtaccaaaaatcgccagcgccatcagccaaaggccgttttcgctcaggcctatcatgacaatgcaaaccgcgcccagcgcatagctcaccgccagtacccggaacgggttaagccgatccatcaacacgccgagtaacagcgcgccaagcgtgccgccaacctggaatgcggcagtcacccacgacgcctgttgcagatcaataccgcgatggttaagtaacgtcggcatccagctggaaagcagatagataatgagcaggctcataaagaacaccacccataacatcagggtaatgacaagctgtcgcccggcaaaaagctggcgaatactgcctttggcgacggctgccgtctcatgcagaaagaattgcgtatcgtgatagcgctcgccggtaatggcgctgaccgtccgggcgacaacggcttgcggtagttggcggcgtacctgccagcggggagattccggcagcgcgaacagcaggccgaaaaacagcatcaaaggcaagatgccgcctagcgccagaattccgtgccagccaatcagcggcaccagttgcgcgctcacaatcccgcccatcgccgaccccagggtaaaaccgcagaacatcagcgtgaccagcgctccgcgtcgacgagcgggaaggtattccgacgtcatggtgatggtattcggcatcgctccgcccagtcccagaccggttaagaagcgcagcaacaccagggtttctatatccggcgagaaagcggaaagcaggctcaatgcgccgaatagcgccacgcaaagctcaatgacccgcttgcggccaaaacgatccgccagcggcccgcatagcagcgcgccggccgtaagccccagcagccctgcgccaaacagcggcgcaagttcgctggcgcttagctgccagtgagtacgaatatccggggcgatgaagccaatcgcggcggtgtcaaaaccgtcgagcataaccaccagaaaacagcagatgataacgcgccactgcattttgccgacgggcgcggcatcaataagggcttgtagatcacgtcgttgagtcatagctaatgcctcagtgcagggagatagatgttgtttttatgtttgctatgttacgagtttgtagagtgagcgataaaatgtacaatggcttttcaggcagagacataacctggaggttatagcgaatggcgaactgggcgcagaaattgaaattacatcacctgcaaacgctggttgcgctgggcgaacagggcaacctgacgcacgtcgcccggatgatgaatatctcccagccggcgctatcgaagtggctatctcaactcgaagatgagataggcatcacgctttttgagcgccacagtaaaggactacgcccctcggaaggcggtaaattactgctccagcacgcccagcgcctaattaacgatctggagcgttcacagtatgaaatcgcccgtttcaagcagggcggcctggttggcagcctgaagatcggctgttcgcccgtggcgactgactgcgtatcacaggcgattctgagcctgcttaacgaaatgccgacgctgcatctgaatattgaagagaaggtaatgacgccgctgctgcacgatttgcttgccggtcaggtggatgtggtggtagggcgtgtcggcggccgcgccctgcaactgccgcttaattatcaggtactttataccgagccggtctgctttgtggcgcgtccgcaccatccgctggccgcgcgagcgcagatcgcctggagcgatctggcgcactggcggtggatagtctggccaaccggcacccctattcgcatcagtattgataacgccctcgtcgataatggcgtcatgctcccggaaaacaccattgaatcggcgtcaatgaacgtcagcaccaatttgctgcaaagcagcgatatgatctctattctttctttacggctggcgcaacgctatgccagccaggggcaactggcgattttaaacttgccaaaaattgagcaaaaaggcagcgtagggatgttctggcgtaagaatgagacgccgtctttggccctgagtcgctttttgtattttttagcccaggtttaacgccgccgaccaggggcattgcccgatgttcctgctgtctatacccactatgctaagaattcatgatgtgatcggtagcacgttttaacgtttaattgtatgatgaatccatctcatcaagggctttaaacatgagtaagtcactgaatattatctggcaatatatacgcgcttttgtattgatttatgcctgtttgtacgcaggcatttttcttgcatcactgcttcctatcactattcccggcagcattatcgggatgttaattctgtttgtattgctggcgctgcaaattctgccggcaaagtgggttaaccccggctgttatgtgctgattcgttatatggcgttgctgtttgtgccgattggcgttggggtcatgcaatattttgacttactgcgcgcgcaattcggcccggtggtggtctcttgcgctatcagtacgctggtcgtttttgtggtcgtaagctggagttcacatctgatacacggtgagcgtaaagtggttgggcagaagggaacgaaaaaatgatgacatatatctggtggtcgttaccgctgacgctggcggtatttttcgccgcccgccgactggcggcgcattttaaaatgccgttgctgaatccgctgctggtggcaatggtagtcattattccttttctgttgctgaccggtattccctacgagcactacttcaaaggcagcgaagtacttaacgatctgctgcaaccggcggtagtggcactggcctatcccctttatgaacaattgcaccagattcgcgcgcgttggaaatccattattagcatctgttttgtcggcagtctggtagcgatgattaccgggacatccgttgccttgctgatgggcgcaacgcctgaaatcgcggcatcggtactgcctaaatccgtgactacgcctatcgcgatggcggtgggcggcagcatcggcggcatccccgcgatcagcgcggtatgcgtaatttttgtcggtattctgggcgcggtgtttggccacacgctgttaaacgcgatgcacatccgtactaaggccgcacgcgggctggcaatggggaccgcctcacatgcgctcggtactgcgcgctgcgccgagctggattaccaggaaggcgcgtttagctccctggcgctggtgatctgcggcattattacctcgctggtagcgccctttttgtttccgctcattctggcggtaatgcgctaacgacgggacaaaagaccgggttaaaatttgcgatacgtcgcgcatttttcatttaagtttcacaagttgcataagcaatgagatttagatcacatattaagacatagcaggcccgtaaactacggttccattacattgttatgaggcaacgccatgcatccacgttttcaaactgcttttgcccagcttgcggataatttgcaatcagcgctggcccctatcctggcggaccaccattttcccgccatgctgaccgcagagcaggtctcgacgcttaaaaatacggcgggactggacgaagacgcgctggctttcgcactgttacctctggcggcggcctgcgcccgtaccgatttgtcccattttaacgtcggcgcgattgcgcgcggcgtcagcggcaactggtatttcggcgcgaatatggagttcctgggcgccaccatgcaacaaactgtgcatgctgaacaaagcgcgattagccacgcctggctacgcggcgaaaaagggctcgccgccgtcaccgttaactacacgccttgcggccactgtcgccagtttatgaacgagctgaacagcggtctggatctgcgcattcatctgccgggccgcgcgccgcatacgttacgcgattatctgcctgacgctttcgggccaaaagatctggagatcaaaacgctgctgatggacgagcaggatcatggctttacgttaacgggcgatacgctaacgcaagcggcgataacggcagccaataagagccatatgccttatagccactcaccgagcggcgtggcgctggaatgtaaagatggccgtattttcaccggcagctatgcggaaaacgccgcctttaaccctacgcttcccccgctgcaaggcgcgctaaacctgctgagtctcaatggctatgactatgcggatattcagcgcgcgattctggcggaaaaaggcgatgcagcattaattcaatgggatgccaccgccgcaacgctgaaagcgttaggttgccataatattgaccgcgtccttctcggctaagcaaatgtgccggatagcgacgcactggcgtcttatccggcctgactctcctctcccgcgactcgatacaagggaaatcatgctgaaaatctccgcaatcagacggcggtttcttgcgctacgtcttcgggtacagtagcctgatcgtactttcatcctggtatcgagtttcctgcatgttaaagcgcgtgttttacagcctgttggtcctggtaggcttgctgctgttgacggtgcttggcctcgatcggtggatgagctggaaaacagcgccctatatctatgacgagctacaggatctcccctaccgccaggttggcgtcgtgttagggacagccaaatactatcgcaagggtgtcattaatcagtactatcgttatcgtatccagggcgcgttaaacgcttacaatagcggtaaagtcaattacctgctgctcagcggcgacaatgccctgcaaagctataacgaaccgatgaccatgcgcaaagaccttatcgcggcgggcgtcgatcctgcggacattgtgcttgattacgctggcttccgtacgcttgactccattgtgcgtacccgcaaagtgtttgataccaacgactttattatcatcactcagcgcttccactgcgaacgcgccttgtttattgcgctgcatatgggcattcaggcgcagtgttacgcggtaccttcgcccaaaaatatgctgacagtgcgcctgcgcgaatttggcgcccgctttagcgcgctggcggatctctatatttttaaacgcgaaccgcgttttttaggcccgctggtacctattcccacgcagcatcaggtgccgaatgacgcccaggggtatccggcagttacgccggaacaattgcttgaactggaaaagaaaaaagggaaatgatcatggatgtacagacgatatttgtcatattagcctttctgctactcccgcttttttgcttccgtgaggcctggaaaggctggcgaaccggcgcggtagataaagttgtcaaaaatgcgcgaaaaccggtttatgtctatcgccatgccgatcccgtacaatattggtcttatctttttctttataccggttgcggttttttatttactggaatgattatttatcttcttttttatcgttaatctatttattatccctttaaaattgagaatagttattattatgatataaggaacaaatgctgttttgcattctggtttcatttttttgtgaattctttcacagaatacccttctttcaatgcttaggctggcggtagattttagatcattaaaacgcgttatttgcgtttcgccttaatttattcaagcattaaggaagattatatgccgcaacaaaattatctggatgaactcacgcctggttttacgccattactggcaataaaagaggcttcacgttgtttattatgtcacgatgcgccctgtagtcaggattgcccggcgcaaaccgatccggggaaatttattcgttctatttactttcgcaattttaaaggcgcagcggaaactatccgggaaaataatgcgcttggtgctgtctgcgccagagtctgtccgacggaaaaattatgccagcgcggatgtacacgttccggaatagataaacctattgatattgcacgcctgcaacgttttattaccgattttgaacagcagactgccatgcagatttatcagcccgggagtaaaacacgcgggaaagtcgcgattattggcgcgggtccggcaggtttgcaggcaagcgtgacgctcacacatttaggctatgacgtcaccatttacgaaaaacagccgcagcccggcggatggctgcgtcacggcatcccggcatttcgtctgccgcaaagcgtactcgatcaggaaattgcccgcattgtagaaatgggcgtcaatattaaatgtaattgtgacgtgggcgggtcgctatcacttgcgcaactcaaagccgaatatcgcgccgtgctgatgaccgtcgggatgtcctgtggctctgatttaccgttatttgagcaagccagtcacgtagagattgccgttgattttttacagcgcgcccgtcaggccgacggcgatattagcgttccgcgtagtgcattaattattggcggcggcgacgtagcgatggatgtcgccagtacgttaaaaattctcggctgcccttccgtcacctgcgtggcgcgggaagaattagcccaatttcccgccagcgaaaaagaatttaccagcacgcaggcattaggcgtatcgattattgatggctttacgcctgtcgccgtcagcggaaataaagtgaccttccaccatgtacgccactcaggagaactgacgctggaagcggaaaatattattttggccgtggggcagcacgcgcgactggatacctttgcggagataaaagcgcagcataatattatcgacacgcataattatcaaaccgacgacccggcgatctttgccgctggcgatattgttaaaggtgataagaccgtcgtttatgcggtaaaaaccggaaaagaagccgctcaggctattcatcattatttagaggaggcctgctcatgttaacaaaagatttgtctgttaccttttgcggcgttaagtttcccaatccgttttgtctttcttcttctccggtaggcaattgttatgagatgtgcgccaaagcctatgataccggctggggcgggatcgtttttaaaaccattggtttttttattgccaacgaagtctctccacgttttgatcacctgacgaaagaagataccggttttattggtttcaaaaacatggagcaaattgctgagcatccgctggaagagaatctggccgccattcgacggctaaaacaggattatccggataaggtgctgattgcttccatcatgggggaaaatgagcagcagtggcaggaactggcgcgtctggttgaagaagccggcgcggatatgattgagtgtaacttctcttgcccgcagatgacctcgcacgccatgggaagcgatgtagggcaaagcccggagctggttgaaaaatactgccgcgccgtaaaacgcggttcatctttgccaatgctggcgaaaatgacgccgaatattggcgatatgtgcgaagtcgcgctggccgccaaacgcggcggagccgacggtatcgccaccatcaacaccgtgaaatccattactaacatcgacctgaaccgcaaaatcgggatgccggtggttaacggtaaatccagtatctccggttattcaggaaaagcggtgaaacccattgcgctgcgttttatccagcagttgcgaatgcaccctgaactgcgcgatttcccgattagcggtatcggcggcattgaaacctgggaagacgctgccgaatttctgctgctgggcgcggcgaccctacaggtgacgacaggcattatgcaatacggttaccgcattgtagaagatatggcgagcggcctcagccactatctggccgatcagggatttgcctcattacaggagatgatcgggctggcgaatggcaatattatcccggcggaagacctggatcgcagctatatcgtctatccgcggattaatcaggagaaatgcgtcggctgcggacgttgctatatctcctgctatgacggcggtcatcaggcgatggagtgggatgaacacagccgcacgccgcattgcaatacggaaaaatgcgtcggttgtctgctgtgcggtcatgtctgcccggtcgcctgtattgatttaggcgaggtcaaatttaaaaaaggcgaaaaagaacacgcgttaacgctgtagctcacggtatgaagcccggcgcgcagtttcgctgcgccgggttatctgataagcaaagtaataggtctggataactacttcttacgcgcgtatttcagcgagtccagcgccacggcgaaaatgataatgccgcctttgataatgtactgccagtacgggtttacccctatataggtcaggccatagttgatgacggtaaagataatgacgccggtcaccacgccgaagaccgtccccactccgccgctaaacgatacgcccccgaccacgcacgcggcaatcgcatccagttcatacataaagccgaggttgttggtggcagaaccaatacgccctgcttccagtaagccgccgaaggcataaaacacgccggagagcgcataaatcatcagcaggttcagcgccacgtttacgccagaaactttcgccgcctccgggttgccgccaatagcaaaaatgtttttaccaaaacgggtcttattccacagcacccagacaaacgctaccgcaatcagagcgtaaaaggtgatgtatgagagccggaaactgcccatcgccacaaagccctgcgcaaaggtggaaaagccgctgtcaaagccggaaatgggcgaagcgccgacaaagtcatagtaaagggagttgatcccataaacgataatcatcgtgccaagcgtggtaataaacggcgtcacgttcaggtaagcaatgatgatgccgttcaccaggccaatcaccgcgccaatcgcgcagacaatcaggatgaccagcgcaatcggcatggtcgccatttccggaaacactttgttggcgttttccattgattgcagtaatgttgccgccacgaccgccgccagccctacctgacgccccgccgacaggtctgtcccctgggtgacgatgagtcccgccacgcccagcgcgataataatacgtaccgaagattgcgtcagaatattacttaaattcagcaaacttaaaaaagtcgggtcctggaaaataataatcgccagcaacactaaaagaacgacgtaaattccgccctctttcagccaggtcaaaaagcttttcttgtttaacgcactcataaggagcccctgatcttaaaggtgcaaagaagcaagacgcaaaatttcgttttgcgttgttgttttagtatcgacaatgccggaaacgagaccgttactcatcaccaggatacgatcggtaatccctaacagctccggcatttcagaagagataatgatgatccccttgccttttttcgccagttccgcaataagctgataaatttcaaactttgcgccgacatcaatgccgcgggtcggttcgtccagcattaatatttccggctgcgttaatagccagcgaccaatgatcaccttttgctgattgccgccggaaagcgaaccaatttgcgtgcgatgccccggcgtttttacccgcatggaatcaatgacccattgggtgtcgcttttcatccgggaattatccagtaaccccactttatttttataattacggatattcgaaattaatgagttaaatccgatatccagataggcgtaaattccggtggaacgacgttcttccgtcaccagcgcaaaaccgtggttaatcgcttcgttcgcagtgtgattattaattttcttgccatgtaaagtgattgtcccggacgacttctcacgaatgccaaacagcgtttcgacgatatcggtacgctttgccccaaccagaccggcaatgcccagaatttcgcccttgtgcaaatcaaaggagacatcgcgaatggaaggctggcgcagcgaggtcaggtgacgaacctccagaatcacgtcgcccggcttattttctttatccggaaagcgctggttcagggaacgcccgaccatcatcgcaatgatcttatccatatccagcccttccagcggctgggtggcaatccactgaccgtcgcgcaaaatagtaatttcatcgcacaattgaaaaatttcttccattttatgcgagatataaacaatgccgcagccgcgttctttcagcttgcgaataatggtgaacagatgattaacctctttctcagttaacgatgaggtcggttcatccataataacgatcttagcgttataggaaaacgccttcgcaatttcgatcatctgcatttgcgaaacggataacgttcctacgcgcgcgcgcgggtcaatatcgatatccagctcatcaaatatcgctttggtatcctggtacattttatcctggtcgacaaacatacctttggtaggataacgccccagccacatgttatccatgaccgaacgttgtaataccaggtttaactcctggtgtaccatcgaaatcccattctccagcgcttctttcgccgaatggaagtccacttcttttccctgaaatacaatgctgccggagtctttttgataaataccgaaaagacattttaataatgttgatttgcctgcgccgttttcgcccattaatgcatgaatagagtgcggacgaacgtttaagttgacattatcaagcgctttcacgccgggaaatgatttgttaatgccacgcatttccaacaaatattcacccgacgacggagagatcgtgctgcccataatgataccctgtcggcctttttaattatgactatccgcgccggatggcaaaagaaatacgttatccggtctgcggcacgtcacccttccacggtttcagggcgcaacaaaattgcgcccacagacggaaaagttatttttgggtaaattcgctcagattgtctttgtccacgccgacataaggcacgcgcacgattttgttctcaatcttccagttggtgccgtcagccgcgcccttgccttcggcgaggtttttcgccagatcgaatgtcgctttcgcctgattgttggcgtcattcagtaccgtaccggccatcgcgcccgatttcaccagcgccagagcttccggtaacgcatcgacgccaaagaccggaatcgatgatttattatgcgctttcagcgcctctaccgcgcccatcgccatcgcatcgttattcgcgataaccacttcaatcttgttagcgttcgggccagatagccaggcatccatcttatcttttgcctgcgcggtatcccacatggcggtgtctaacgccagttgctcggtctgaatacctttagcatttaactctttcaccacatacgtcgtacgagcttcagcatccgggtgccccggctcgcctttcagcagaacatactgaattttaccgtctttattcagatcccaaccctgattcgcctgccagtgtttggcaatcaagtcgccctgaatcacaccggattctttagagtcagtcccgacataatacgccttgtcatagctgtccagcgctttgcgggaaggctctttgttaaagaacaccaccggcacattttgcccgcgcgctttctcaatcaccgtaccggcggctgccgggtcgaccaggttaatcgccagagctttaacccctttcgccaataaaacgtcaatttgatcattctgtttagattgatcgttttgcgagtcattcatcagtagctgaacatccggcgcggatttgccatctttttcaatagccttacgcaccacggacataaagttatcgtcatatttataaatcgtcacgccaatacgagtatcagccgcctgcgcgtgcgcgccgaataacagacttgccatcacggcagaaagggtcagtaccttcttattcatggtagctccggttttattatgtagggtatagcgtaaaaaaatgcccggctgttcagcacgttaacgcgtgttactgaacgccgaagcgtatttagagcctatcccaccaggcgttattggcgcagccagtttggacacggacagcgcgcaaaaaccggagcgtacacgtagtacgtgaggtttgactcgctacgctcgcccttcgggccgccgcaagcggcgttcaaaacgctaacgcgttttggcgagcactgcccaggtccaaaatggcaagtaaaatagccctaatgggataagctcttattcaactctttatttttgtccggtagtcgcgggatattgtgataacggtttttataagcgaaataccccagcaaaactgacaactaactgttacacgttagttacagtgcgacaaacgttgtcatcatagctatcacaatgttaataaactgtgaatttactcacagattgaaaacggttacatgcggtgcgtaatcagttagtgatcagtaccgcattctgtcgccatgccaccgaatggcgccgtaccagggtcggcatgaagcagtgcgtcgccgtgatatccagcgtgcctgcagccccctgtaacgccagctcggtcgcgattttcgccatagaagcaataggatagcgcacggtagtcaactgaggatcggtataacgagcaatagggatatcgtcgaaaccgatgacagacagatgcaagggaatggcgatgccgttatcttttaacgccgtcagcgcacccgccgccatgttatcgttataggcaaataccgccgtcagttgcagattgcgtcccagcaactcaaccattgccgactcgccgccctgcatgtccggcgtgccggtgcctatccagctctccgacgcagcaatcccctgctcttgcagcgcgtgtaaccacccttctctgcgcatcgcgtcatcttcaatacggtggctggaggccaggtagccgatgcgttgatgtccattattcagcaacattcgggtcgccattctggcgccgctcacattgtcgagacaaacacaacgatgcgcataacccggcacgatacggttaatcagcaccataccggggatctgatccataaagtcgctcagctcgcgatcggttaaggcttttgagtgaacaatcaatgcgttacaacgctgacggatcaagacttcaatcgcatggcgctctttttccgcctcatgataactgttgccaatgagaacatatttctggtgctgctgcgcgaccagatctacggctttcaccagagcgccgaaaaaggcatcggaaacatccatgaccacgacgccgatggtatcgctcacctgggtggccagcgcttgcgcattcgcatttggccgatatcccagcagggtgacggcctgcataacggcgtcacgggtgtcgggactgaccaacgcgctgttattcagtacgcgggaaacggtcgctacagacacgccagcctggcgcgctacatcacgaatggtgatcatattcactgccctgtttgagttcaaaaatgctcacaaatgccccgttagcaggcggctattttgtcagcaccctgcccagggctgcgtgagaaacatcacagggatggaaacggttacagccattttgttaatgaatgtgatccagatcgttatctgagcgatcctgacgcgcgcaacgtgagttgacgccataaccactcgaccggtccctgtcgccagaaacgtagccagatgacggaaaagagaaggtttattgcccataccggaacgacaaagaacaagagttccagtcgattgaatttcataaataagccaaactgataaaacagcgtggtacagatgatcgtctgcagcagataattggtcagcgccattcgccctacgcaggcaatggcaagcgtcagtctgcatcggctaagctgcggccagaagccaaacatcagcgcggcatagcccagcgtttgcaacggcgcgctcagttcacgcggcgcctgcaataaaaaggcgcaccagcggtacgcccagtccagccgccattgtaaaatgaccgcaggcaggttgatcagtagccctaacgccaccagcagagccccggtacggcgatagtgccgcagactgtactgacctttcagccagccgctacgcattagcgcggcgcccagcagcatcatacccgccagttgccagccatactgcgcgccgagcgccagtaaactattcgacagcatctctgcccggttgctgatagcctccatgccgccgttcagcttccagtatttttcatacaatattgccgacgcatccggcgtccaggcgcggctggtttcgctactcgataccacgcccagcagcagtagcacgccaatccctaccagataaaggagtatgccggtattgaacaggctttttaccgaaggcgcatcgcgtatcagtcgccagcaaattaacccgaccagaccgtaggccagcagaatgtcgccgtcccaaaagaataacgcatggataaaacctaacagtaccaatagcgttaagcgcgactgaatccactgtttaccacgcggaagcagcatttgtagccccgcgccaaacaacaacgcgaacagcgtaagaaacttagcctgcgccacaataccgagaatcgcccaggaccaggcgtcttcgggaacgatcgcgccgtaccaggcgggattgagataagccgccttcggcaatccaaaggcgctaatgttaagaagcaggataccgaggatagcgacgccacgtacaaaatccagcgtgacattacgctccatcgtctccgccttaatcatggatgatggcgaacggcacgcagaaactcctggcgcgtattctggctggacttaaacaatccacccagcgacgtcgtcgtcgtggcgctggttgcgtcacgaataccgcgcgctttcacgcagtaatgcaccgcatcaatcgataccgctacattattggtgccgagcaaggtttgcagcgccgtcagaatttgttgggtcaaacgttcctgaacctgtggacgctgggcgaagaattgcacgatgcggttaattttcgacaggccgatcacggaatctttggggatatacgcgacggtcgctttgccatcaatggtcacgaagtgatgttcacaggtgctggtcagcgtgatatcgcggacggtgaccatttcatccaccttcattttattttcaatgagggtaattttcgggaaattggcatagtcgaggccggcgaaaatctcgtcaacgtacatcttagcgatacgatgcggcgtttccatcagactgtcatcgctcaaatcgagattcagcaactgcataatctcagtcatatgccctgcgataaggctttttcgcgtttcattatccagttcatccataggcgggcgcagcggcgtttccagcccccgggcaaccagcgcgtcatgaaccagggccgcttctttactgagtgatggcattaatcgtgttctcctgcaggtgtggcgcctctgccctgcatggggcaaagtttgtcaatattgtgacagtgtgattattgtgcgtgaggtagcgcacataatccagtattcacgcccataattgttgaaattgtcgctgcctttcatgacatctgttccggtgcgaaaatgatggcaggacaaagggcatatttgttaacgcaacgttatttaaatgatgaagcatgtttatgtattacggaagtgaaagttactcacaacgcggtgaataatctgtattatgaagaatctgcataccttatcaggttcactataaaaggagcccccgcatggaaatgctcgaagagcaccgatgttttggcggctggcagcagcgctggcgtcatcatgccgccacgctaaactgcgccatgacattcagcatttttcttccgccgactcaggataatgaaccgcctccggtactgtactggttgtccgggttgacctgcaatgatgagaactttaccaccaaagcaggcgcgcagcgtatcgcagcagaactgggcattgtattggtgatgccggataccagtccacgcggtgaacaggtcgccgacgatagcggatacgatttaggccacggcgccgggttttatctcaatgccacacagccgccctgggccagccattatcgcatgtacgattacctgcgcgatgagcttccggcgcttatccagacacagtttaacgtcagcgaccgttgcgccatcagcgggcactcgatgggcggccacggcgcattaatcatggcgctgaaaaatccgggcaaatacaccagcgtctctgcttttgcgcctatcgtcaaccccagccgcgtgccgtggggaatcaaagcgcttaccgcttatctcggcgaagatgaatcagcctggactgagtgggatagctgcgaattaatgctggccagcgagccgcaggacgccattcctgtgctcatcgatcagggcgacagcgatcaattcctcgccgatcagcttcagcccgccgtactggcggaagccgcgcggcaaaccgcctggccgatgacgctacgaatccagcctggttacgatcatagctattattttattgcgtccttcatcgaggaccatctgcgctttcatgccaggtatttacgggacgagcgtgagacgtcaccaacataatgaattttccagcgccgcgctgtagttcacctcctccgactgcggcgcggaagatttattatttaaatccgcggcctgctggcgtacctgaaggcggccgctgccctctccgccttcataactttcgtgaaaattacgcagctcggattcaaacagcaccgcatcaagattatgcaacttatccagcgcccgcaggagagaaattagcgtatcaagattgagccctccccccttctcgatacgcttgatggtggcgatgccaacgtgcgcgcgatcggcaagctgctgctgggtcatcgaaagagacagacgcgtctcctttaagcgggcgcacaacgacaggataatctcgtcgttattcatcgtattgtatttcacgctgttaccctctcttgcgcggctgaattttccccagcgaaccatgatacgtttcacggtatttagcgctcatgtctttaccggtctcgtacatcgcagcaatgatctcatcgagcgaaatacagggttcgcttacgcgactcatcgccatcgtcgccgcgtttatcgctttcacggcagagatggcatttctctctatgcagggaatttgtacctgcccgcccagcggatcgcaggtcaatcccagatgatgttccatggcaatttcagcggcgctcagcgtttgctccacggatgcgcccatcagttcagccaggcccgccgccgccattgagcacgccacgccgatttccccctgacagccaacttcagatcccagaatagaggcgttttgtttaaacaatatcgcgatagcggcggcggtcaggaagaaacgggtcagagcaccgggctccagcggcgtgacaaatttatcataccagcagagcgctgccggaatgatgccgcacgcgccattagttggcgcggtaacaatctgtccgccgctggcattttcttcgcttaccgcaatcgcgaaggcattgacccagttcagcgcggttaaaaaatcgctggcggagcggttagcctgtaacgtcttatgtaacgcacaggcgcgccgcggtacctgatagggaccgggtaataccccctcagtatgcaggccgcgataaaccgcctgctgcatcacgtcccatatttgcgccagataattctgcaacgtctgtggcgagtggcggcacagctcatttttcatcatcagcgccgccacggacaggccattacgtcggcacagcgccagcaactgcgcggcatgactaaattcaaagggcgacactgtacgcaaaggaagcgatggcgtcagcggctcgccatgtttgcgaacctgtccggcgccggtcgaaaaccaggtctcttcatacaccgtgaaataatcatctctggcgcgaaacgtcatggcataaggatggcctggatgcgcctggtgattggcgataatcttgacttttatcgtgattccgcccgcgtcggagagcgggagttcgattttgttttcattttccgcacgcttaatcaccgccatatgcgaacggagatcgacattctccggctggcaacccagcagcccaagataaagggcggtatccacattgtggcacttgcggcttaacgataacgcgccatacagctcgatttcaatttcccgaattagcggcaacgtctcttgttctctgagcaatgaaataaagtgacaggcggcgcgcatcggccctacggtacgtgagctggatggacctattactattttgaatatatcaaggcaactctccatcgttatatcaatcctttcagtgtcattcgcgttcagtaataaataacatcctcgcacagttggcatatcaaaagtgataccttttgtgtctgaactttacctggtatcaaaaacaacgcttttttagcccttttctggctgtgatatctgtgatagcacgagattccacgccgcaaaagagccattataatacccgtaaattaagggagttatcatatgagcattatttattttattactacacaggatatcgatacgtttcagaaaaaattacaggaaacgttatttaatgccgtcaccatgccgtttccgctattatttgataaacgttatgccgcgcttatcaataccgcttatttaaagcttacgctgccagcggaatgtctgacgcctgaattttatcgctatttacgcgaactctcattgcaatggcagtttgatttttttattaagccgcagccactgcctgctaacggtattatcgcgtttgatatggactcgacatttattgcggaagaaggcgtggatgaaattgcccgcgagcttggcatgtcgacgcaaatcaccgccattacccaacaggcgatggagggcaagcttgattttaacgccagttttacccgacgtatcggaatgttgaaaggcacaccgaaagcagtgctgaacgccgtatgcgatcgcatgaccctttcgccaggcctgttaactattctgccagtcatcaaggccaaaggatttaaaaccgcgattatctccgggggactggatatattcacccagcgtctaaaagcgcggtatcaactggattatgccttttcgaatacggttgaaatacgcgataacgttctgacggataacattaccttgccgattatgaatgccgcaaacaaaaaacagactctggttgacctggctgcccggttaaatattgccacggagaatattattgcctgcggtgatggcgccaacgatctgccgatgttagaacatgctggcaccggtattgcctggaaagcgaagccggttgtacgggaaaaaatccaccatcagattaattatcacggtttcgaattgcttctttttcttattgaagatgaattataacgcgactcacctcgccggaagggaattttaaaatgagtataaaaacatttattttcagccagcccgataagccgattgtaaaagagaaaaaagagatagaccagacctataaaaaatttcgttttgagattatcgcctcggtctttatctcttatgccgtcttttatcttacccgtaaaaacttctccgccgcgatgccggccatgctgacggaaacgtcgctgaccgcagaagacttcgccattatgtcttctattttttacattctttatggcgcgatgaagtttgtcggcgggatgctggtcgataaaattaacccgaaagccatgaccggcccggtgctgattggcgtggggattgtaaatattctgttcggcttttccgatagtgtggcggcattctacgtactgtacagcctcaacgcgatcttacagggcaccagctttccgccgatggcgaaaattatggcctcgtggttttcgaaaaacgaacggggacgctggtgggctatcgttgaagcggcgcacaatatcggcggcagcctcgcgccgctgctgaccagctttgctatcgcctttagcggtagctggaaaatggggttttatgttcccggcgccatttcgctgctgatggggatagtggcgctatttaccattaaagatcgtcccggtacgttaggtttgcccaacgtggggcagtggcgtaacgacccgacagaactggcccaggtcaaggccagcccggtcaacctgagcttctggcagatttttgtaaaatatatcctgaccaatccactggtatggatcattattatcggcgatatgtcagtttatattgcgcgcaccatccttaacgactggccgcagatttactattcgcaggttcacggctggagcctgataaaagcgaactcgattatttcctggtttgaggcgggcggactggcaggtgggttgctggcaggctacttgtctgactttatgttcaaaagtaaccgctggatgaccggattaatcttcgcgttagcgctgtgcatatgcatcgtgctggtgccgctggttcaggatacctcttacaccctcaccgcgattctgttcaccatcatgggcttcgccttatacggaccgcatatgctttttgccgtcggctgtctggatgtgacccataaggatgcggcgggatcgattaccggctttcgaggattgttcagctatgtcggcgcggcaatggccggtgtgccggtaattatggtgaaaaatagctgggcgtggtcgggcgtttatatctatgcggtgatcgccattctgctaacgactctgtcgctggcgctgctctccaggctgcatcggttataacattctggcgacagcggcaaaacgcggctgtcgccagtctctgtcagaaacggtaatccaccgccataaagtaacgacgtccgtcttcggtataaccgtagtcgtcgcgtttgagatctttatcgcccacgttcagaacgcccgcacgcagtttaacgtttttcgtcgcctgccatgccgcgccggtatcccagaccacgtacccgcccggcgttttcgctgttgcgctgtcggcccgcttacgcccggtatacttccctgatacgtagaatgaccagtcttcgagctgcgccggtttccagtccagcgtaccgttcgcggtgtggaacggcagatcggaaagcggcttgttcccgccattactgacgtcgcgtccgtcgttataggtgtaattcaacgacagtttccacgcctcgttaaacggaactttcaactcggtttccacgccctgaatacgcgctttattcacgttgtaataacggaagaccggaacgcgctgtccccgactgttggtttcgaaaccgacaaagttggaatagccgggcgcggcgttaacgtcaggggtacgactaatgctgatgcgattgtccacatcgttacggaacgtggtaacgctcgcttccacgccctccagtatgccttcttcgccccggtaataaaggccgagctcccagctttcactggtttcaggtttcagatccgggctaccgacaatgcggcatccgccacggcaggagttggtcgcccagtccggacttaattgcaatagcgacggcgctttaaaggccgtggcccacccacctttcaccgtcagggtatccgttgcgttatagaccagataagcacgcgggctccagtgatcgccataggtttcatgatcatccatacgaataccggtggtcagcgccagcggttcgaagatgcgccactcatcttcaaggaacagagcatactggctggcggaggttttagtactggaaccgccggtcaggttgaccgcatcgctcagtttatcgtgacgccattcgccgccgaaggtaaggaactggttgacagccgctaacggcagaacgtatttcccgtcaatcgaattgctttctgacgtgatagggctactgttgccggggtttttgttttccactttttcgccgtagaatttgagctcactattgccgagatcccaacgtccgttatggctcaacgcatagttttgccgttccagacggtttttatccagcgagtcggagtcccggtcctggcgatcaaaaccgtagcctgcggtaacgtcatgattttcgtttggtgtccaggcaaactcgacgtttccatcccggctggtaaatccttcaatgcgcggcgtttcacccgtagcggtggtggcggaactctgctgctcgtctttttcgcgtttcgccaggctaccgtaggctttcattcccagcacgccgtcgatcagcggaccgctggtaaagaactgaccgttataagtatcgccacggtcgcgatgttcctgaatagtggagtcaaccgtgacgctgccgtgccatttctgaccaatttttttggtgataatgttgaccacgccgcccagcgcatcggaaccatacagcgaggacatggggccacgcaccacttcaatgcgttcgatagcgtcaaccggtatccagttcagatcaaaatcattatggcggaagaccgcgttacgggagttaacgcgcttaccgtcgatcaggatcagcgtataactgctgtccagaccacgaatactcacgcctttacggttatccccttcgttagtgagctgtacgcccggcacctctttcaggacatctttcaggttttgcacgggcctgcgctgtaaatcttgctgggtaatgacgctgatacttgctggcgcatctttcagattttgttcgatggcggacgcggtaacgaccatggtttcaccatcatccgttgccgcggcaaccggccaggccaacgtaactgcggacatacaaagccctacccgaacgaaagggttaaacctaaacattccatttctccatgaggtaaatacgacaaaaaaatcggttatcgctcacaacgcattacgtttcgcctgcgataacggttatcacggcgaactctttttattcaggcgagtcgggctcatgagtgacggtcgcgcccgaatcttcatcctttctgatttcgatcgtaacgataaagcaaacgataataattatcaatttaattgttaataattatgtcatttgaaccaatcatgaagaaaaaacaaaaaaccctctcgaatgagagggttagaagagtcagattcaggcagtcagtgccggatagcggcataaaagcctatccggcctacgacgaaaataccgcgttactttttaacgcgttccgggaagtgcatttcgctatagcgcacgaaatgcgtaccttttatcagcttgtagccgaaccagataagcaggaacagcggaataccgatataggtcgccgcgacgccgccccagtcgatggtatctttcaggaacgcttcatagttctgccccaacgtaataatcaggcacagtacaaaggcgaaaatcggccccagcgggaagaacccggaacggtacggcaaatcattcacatcatacccttgtaacacgtaaccgcgacggaagcgataatggctaatggcaatccccagccaggcgatgaagcccgtcataccggaggtgttcaacagccacagatagaccgtctggttgccaaacattgaggtcaaaaagcaaagaccggcaatcacggtggtggcataaagcgcattgcgcggtacgccgccgcgggacaatttcgcaaaaatacgcggggccttaccgtcacaggccagggtgtagagcatacgggtcgaggcatacatcccggagttacccgcagacagtaccgccgtcaggataaccgcattcattatcgccgccgcagacaacaagcccgcatgctggaacactaaggtaaacggactgacgctaatgtctttgacgtcgttacgcagcaggtttggatcggtataaggaatgatcaggctgataatcaaaatcgcgaaaacataaaacagcagaatacgccagaacacctgacgcaccgcgcgtggaatattcttctccgggttttcagattccccggcggcaataccaatcagctcagttccctggaaagagaagcccacgatcatcgcgacgccaatcattgccgcaaaaccgccagcgaaaggcgcatcgcccgtcgtccagttgctccagccgaccggctcgacacctttaaagataccgataatcatcgctacgccaacgatgatgaagataataacggtcgcgactttaattaacgagaaccagtactccgcctcgccaaaaccgcgtacagaaatgtagttcagcaagaaaatgacgcagaggaatagcgcgctccagatccagcccggcgtgtccgggaaccaccagcccatcaccaattgcgcggcaaccaggtcaacagcgatagtcaccgcccagttgtaccagtagttccagcccagcgcgaaaccaaagccttcttccacatagttctgaccatatgtcgcaaacgagccagatactggcatataggccgccagctcgccaagactggtcatcaggaagtagaccatcaaaccaatcagaatataagaaaacagcgcgccgcctggccccgcctgagaaattgtcgcaccagatgcaacgaaaagacctgtcccgatggagccgccaatggcaatcatcgtcaggtgacgcgcctttaattcgcgacgtagcgcgggcgcttctgtggttttagttttggaacccatgtgaaaatgctatccatccaaaaaatgaggcgcgattgtaacagacgaaatactatccttccgacacaaatgcgcggttataagagaccttcatgaccggccacggattataagtaaagcagagaataacgtatacgtaagcggatactaaaaatggcgatgccgcccgggcagccctcctcttcacctttattcacagtaactcaaaaaacgctgcaacgcgttagaaagatgtttctgccgatgatgaacacgccacaacgtgcgcaccaggcgcggtaacggcaccgcgacttcgcccagggttcccgcctggagttgttcagcaatcacccggcgcgataaacagcttatccccagtccatgacgcaccgcatgtttgatcgcttctgaattccccaactccatcgccatatgaaagcgcggcaaatgcgacaacagcaaataatcgacaatttcccgcgtaccggaaccgcgctcgcgtaaaatccatggggatgccgcaagctgttccagcgtcaccggcccctgcgtcagcggcgaggacggcgcggcaaagaccaccagctcatcttccagccacggctcagagataatctctgtactgtgacacggcccttcaatcaggccgatatcaacccgaaaatccaacaccgcgttaatcacgtcctggctgtttcccacgctgagttccagcggcaaggccggataatgctggcgatagcgggcaatcatggcgggtaaaatgtaattgccgatggtgctactggcataaacccgtatcgcgccgttatcttcacgaaatagctgctcaatttctaccgcttgctccagcaatgccagcgcgcgcgggtataacaagcgcccatgttcgttgaccaccagccgtttccccacccgatcaaacaactgtacgccgagctgaccttccagatcggtgagcgcggcgctaacggcggactgcgataatgacagcatgaccgacgcctgggttgttgaaccgcttttcagtacttcagcaaacacttcaagttgtcgtagcgtaatatgcatagtcgtatcccaccgatagcgtttcacttaccacttataaagattaattataaatatataatcaattttatttttaaaccagatcaccgtaaccttattgtccatatacaggagaaggttatgacagaactcaccttgcagaatcatcgtcgtacaatgtggcattttataccggggctcgctctgagcgccgtcattacaggagtcgccctgtggggcggcgctatccctgccgttgcaggcgcggggttcagcgccctgaccctggctatcctgctgggtatggttatcgggaataccgtctatccacaaatatggaaacaatgcgacggcggcgtgctgtttgcaaaacaacatctgctgcgtttagggattatcctttacggcttccgccttaccttttcacaaatcgccgacgtgggtattagcggtattgtgattgacgtattaacgctttccagcacgttcatgctggcctgcttcttaggccaaaaagtctttggtctggacaggcataccagctggctgattggcgccggtagcagtatctgcggcgcggcggcggtactggcgacagaaccggtggtaaaagcggaagccagtaaggttactgtagccgtcgcgactgtcgttattttcggcaccatcgctattttcctttacccggcaatgtatccgctgctggcgcactggttcagcccggaaacttacggcatctatatcggctcaaccatgcatgaagtcgcgcaagtggtcgcagcgggtcatgccgttagcccggatgcggaaaatgcggcagttatcgctaagatgctgcgtgtcatgatgctggcgccgttcctgatcattctggcggcacgcgttaaacagctttcaccggcgaccggcgcggaaaaaagcaaaattaccattccgtggtttgctattttcttcatcgtagtggcgatcttcaactctttccacctgctgccgaaagccgtggtggatatgctggtgacgctggacacagtgctgctggcgatggcgatggcggcgttgggtctgaccactcacgttagcgcattgaaaaaagcgggggcgaaaccgctgctgatggcgctggcactattcgcctggctgattattggcggtggcgccattaacgtcctaatccatagccttatcgcataaattattacgtttcacgcctgttaacccgttatcatagcgttcgtaatgaaccgttagcgggtttaacaggagtcttttatgaaatacatcggagcgcacgtcagcgctgctggcggtctggctaacgcccctgcccgcgcggctgaaattggcgcaacggcctttgcgcttttcacaaaaaaccagcgtcagtggcgtgccgccccccttactccccaggtcattgatgactttaaaatcgcctgtgaaaagtatcatttctcggcggcgcaaattcttccccacgatagttacctgattaatctgggccatccggtcagtgaagcgctggaaaaatcacgcgatgcctttctcgatgaaatgcagcgctgtgaacaactcggcttaaccttgcttaattttcatcccggtagccatctgatgcagattgcacaggaggattgcctggcgcggatcgcggaatccatcaatattgccctcgcgcagaccgagggcgttacggcggttatcgaaaatacagccggtcagggcagtaatctggggtttgagtttgaacagttagccgccatcatcgacggcgtggaagataagtcgcgcgttggcgtctgtatcgatacctgccatgcctttgccgccggatacgatctgcgtacgccagaggcgtgcgaaaaaacattctccgaattcgggaaaattgtcggatttcagtatttgcgcggaatgcacctgaacgacgccaaaagcgccttcggtagccgcgttgaccgccatcacagtctgggtgaaggcaatatcggccacgatgcgtttcgttggattatgcaggatgggcgttttgacggtattccgctgatactggagaccatcaatcctgatatctgggcggaagagattgcgtggttaaaagcccagcaaattgccgaagcgatggcctgacgctcaatgttcttcaggcaataaaaaaggcagagcgcgctctgccttttttagcgtgtttctcttatgccgcttttgccgcgacttccgtctccggacgtttcaggacggcataagccagtcctgccaccagcgtaccggccacaattgccagcaggtatcccaataccggcgtaattgcgcctgggataagcagaacaaacagaccgccatgcggcgccatcaattttgcgcctaccgccatagaaatagccccggtcaacgcgccgccaacgatacagcacggcagtacacgcatcgggtcgcgcgccgcaaacggaatagcgccttcagtgataaagcacagccccagtaccaacgccgctttaccgccttcctgctgcgctttgtcgaacttacgacgcgccaccatcgttgccagacccagcgctaacggcggtaccatacctgcggccatgatcgccgccatcggcgcgtaagtttgcgtactcagcagaccaacgccaaacgcatacgccgctttgttcaccgggccacccatgtcggtacacatcatcccgccgagaatcgcgcccagcagcaccgcgtttgcggtccccatggtttgcagccagtgggtgagcccttccagaatcccggcaaccggtttaccgatcaggtaaatcatcgccagccccaccaccagactggaaattaacgggatgatcaggattggcttcagcgcttccatactttgcggaagtttcagtttggtactgataagcttcgccatatacccggcaaggaagccggcaatgatcccgccgataaaaccagaaccggtgctaaccgccagcataccgccaatcagacctggcgtaaggcctgggcgatccgcgatggagaaagcgatataacccgccagtaccggcaccatcagcgcaaacgccgaaccgccgccaatctgcatcagcgccgccgccagcgtgcccggcaccttaaaggcttcaataccaaaggcgaaggaaagcgcaatacacagtcccccggcaaccaccataggcagcatgtaagaaacgcccgtcaacagatgccggtatgcgccagcgctctctttcttcccttcggtcgccgcttgcgatgccttacccgccggttgatacggcgtcgcttccgctacggctttatccagctcctgcgccgtctttttcagcgccaggccggtcgacgtgcggtacatcgggagaccggcaaacttcgccagatccacttcgatatccgccgccacaatcactaaatccgcttccgccacctcttccggggtgatggcattgccggcccccacggagccgcgcgtttcgacttttacccaccagccgcgttttttcgcttctgtttcaatggcttcagccgccataaaagtatgggcgacgccggtcgggcaggccgttaccgcgaccacgcgtttcggaccgccgctcgccgcaggagcagccgcagcaggggcgctgtaaagggtcgcatggcttttggcttcactcagaaacagttccggatgcgcgacggcgcgaccaatatcccccagccaaacctttttgccgttcagagcattgtcgttcggcagagattcgcccagcacgatcgccagctcagcatcattcggattgtcgataatttccagatttgctttatgcgccgccgctccaagcagggttttcgccatgtaagcgcgagcctggccgagattagcgtcaattatcagcagcgttttcattatgcctctcctgctgtcagttaaacggttgtaagtcgacacgcgccatcattgcggccaactgaggacgatcggtaatacccacattgctctggctgaccgccagcgcggcaaccgccgtcgccagacgcagcgtatgttcgctggactcgcgcatcagcaggccgtaaatcaatccgccaaccatggaatcgcctgcgccgacggtacttaccacgtcaactgccggtggtttagcgatccattctcctgaggcgttaacccacagcgcgccttccgcccccagcgaaatcaccacatgagcgataccctgttcgcgtaacgcgtgcgccgcatcaattacatctttcatttccgggagcttacgacccgcccaaatttccagttcgcggcgattcggtttcaccagccacggcgcagctttaagaccggcgactaacgcttcacggctactatcaaagataatgcatggacactggctgcgcagacgcgtcatccagtcggtgaacgcttccggactcacgccagccggtaagctaccgctgacgcagaccatatcgaactggcccagccagctcagggagtcgttaacaaagcgttcccagtctgcgggggtcacgtcaaagccggaaaagttgaagtcggtcacttcgccatctttttccgtcagcttcacgttgatgcgggtccggccctgaaccacctgaaagcggttagcgatgcccagttcgctgaacaattgctgaaaaccgtcctggttatctttaccgagaaaaccgccgacggtgacgtcgatgcctaagtcttttagcaccttggcaacgttaatgcctttgcccgccgcgtgcagacccgtggttttcaccaggttcacttcgccgcgttcgatttcagggcaaaacccaaccagatcgtaagccggattaagggtaatggtggcgacacgcctgctcattatgcgccctccccgagaccggcggcgatcgcatcgccaatcgctttcagcgcctgttcagcatcttcaccctgcgcggtaaagcgcagacgatggcctttcttcacgcctaacgccaccactttcatcagactacgtccgtttgccggtttgccggttccatcaaggtttgtcacggtaatttcactgttaaattgtttaatcgtattcaccagcatggtgcccggacgggcatggagaccatgctcattacgcactacaaattccgcgctcagtacgtcatccgtcagcgcatcatcactggtcagcaacgccagcagcgtcgcggcgtcggcgctcagcagacgatcggctttattgttcagcaacaggtcgccgaggcgttttaacacggcaatcggctgctcgtcgttcatcgcgacagtgactaataaggctgctttttcaccctctacgtcaaacgcctgggtcgcacggcttaccgcaacagcgctgcgcaaattgccttccgcgctgtcgttcagccagatgccttgtcccagattcatcggactatcgttaatcgtttttgcgacaaacgccgcatcaaccgctcccgcctctttcagacgcgccgcatttagcgcctgcaatgtgaccagcgagctggcgatgacatccagcgtcatcgtctcgttatcaagttttaattgttcactttgcttctcgcccatcagcaatgcgcgcagctcttccgccgttatcgcggatttcagctgttcagccacggagtcatcgctcagcacatgcgtcagctgacgcagcaggccgaggtgttcgtccgaactggcggcaataccaatcgccacgtaggcgacctggccttctccccaggtaacgccctgcggaaattgaaagacctgaacgccggttttcagcacctgatcgcgcgtgtctgttgtgccatggggaatcgcaataccattgccaagaaaggtcgaggtttgctgttcgcgcgccagcataccgtcaacatagccgcccgccacattccccgcctgcgctaacgcggcggcgatttgccgaatggcctcttctttatttccggcctgctcgcccggatgaatgtcctgaaccgataactggaacatgtgtctcctctcccgctgaattgaaacgattcagccactatgagaaaaaaagcgccaatctgagttatcaaaaaaaccagatcgcgctgaaacgtttcaagaagtctggatctttctgcttcagcacgcaagaaaagttaccggttttgtagcaattttttgaggtgaagcacattttttctccaacagaccctcaatagctgacgcataaaaggcttcagcttttttctttcagcttgcgtcagcacgccctggtaacaaactggaatgctattttgatttttcgtgtcgattttgattcagacgcctgtttattttctgacgggcagcgtaaactccgcctctcttcacaccactgatatagaaacatgcacaacagtcccgccgccgctgcgcctaaatcgtttgacctgacgtctaccgcctttttgatcgtcgcttttctcaccggtattgccggtgcgctacagacgccgacgctcagtatttttctgacggatgaggttcacgcccgccccggcatggtgggattcttttttaccggcagcgcggttatcggcattatcgtgagccagtttctggccggtcgctcagataaaaaaggcgatcgcaaaaaactgatcgttttctgttgcgtgctgggcatgttggcctgcgtgctgtttgcctggaaccgcaactactttattttgctgtttatcggcgtctttctcagtagcttcggctctaccgccaacccgcagatgtttgcgctcgcccgtgaacatgccgatcgtacaggtcgtgaagcggtgatgttcagctcaatcctccgcgcccaggtctcattggcctgggtcattgggccgccgctggcctatgcgctggcgatgggttttagctttacggtgatgtatttgagcgcggcggtagcttttatcgtctgcggcgtcatggtgtggttctttttaccgtcaatgcgcaaagatgcgccgctggcaaccggcacgctggaagcaccgcgtcgtaatcgccgcgatacgctgttgctgtttgtcatctgtacgttaatgtggggaactaacagcctgtatatcattaatatgccgctgtttatcatcaatgagctgcatcttccggaaaaacttgcaggcgtgatgatgggcaccgccgccgggctggagattcccacaatgctgattgcaggttacttcgccaaacggttgggaaaacgcctgttaatgtgcatcgccgttgtcgccggactgtgcttttatgcggggatgttgctggcgcacgcgccggcaacgttactcggcttgcagttgctgaacgcgatttacatcggcattcttggcgggattggcatgctctattttcaggatctcatgccaggccaggcgggttcagccaccacgctgtataccaataccattcgcgtcggctggatcattgccggttcgctggcgggaatcgccgcagaaatctggaattatcatgcggtcttctggtttgcgttagtcatgattgtcgccaccatgttctgcctggcgcgtattaaagatgtttaacttgcaagcctgatacttttactcttcgacacattcagcgcagagtttatctctgcgcaatgttcatgcgcggtcattcattgtctttttctcaaaacgatattctgtaagcgccctcctacataaaagaccggttattgagaaaattacgcccatcagtccgcaaagaaccaacaccagccgcatcttatattttggtgtgacagcaacatctatcacttcaatgttagcattatttttaaccgcctccgacaacaaggatagctttgcatatgtttccgtttgtaacatatttttatgcacgctataacgtttaatgtcaccatcatcgatataccatgccgccattttatcgacactatttttcagggtggaaataatattattgacgctttcttccctcccctgcgccttaaaaagaacaagctgatttttcgcgtcaaaacttattttatttttatattccgcaggcaagaaacggctaaactggttaaggataaccgttgttttacattgaatatcattagtatagccacataacgcataggtagcaggcgtatccagattaggtttgattgtaatactcacaacctttgtatcatgctgcacgctcacaaaaacatagccaatggcgacaaaaataaaggtaacgatcacgatacttagccattttcttataaggaataaggaaacgtcgactaaatcaatttcactattttctccccgcatttcacatcccttttaaaacgctaatagtcaacccgaatactgaaataacaaaaagcaacaccagcgtaaaaataaacgccctggctgcgaacgtatatttcttcataagataaaacccacacataagaattcgagtattttaaaggaaaataacaacacattcacactggttatatcgatcggtaaatacatcaatgatagatataaactatcaaattcatgatatcgatcgttataaataattaaaatcgatcaagattcctctttttaatagataaaaactatcatataaataaaattgatcgtttttgttttatgtgacggtttgttcggtacacgttcaggcaccaacggggttgagcggcggcatctaccgcttcagaagccacgaaataagggaagcatgtattacgctatttaatggtaaaaggaggtaatttgatgcgcagcttttgcagactatttcgggatataacgtaagcccctgcacatttatcaaaagcggcttagatcatggtaaggttttctgttcgagttccagcaaataaataatggcctcttcccgggtcgttaaacacatgtcccctgtcggttgcaaaccagagcacacttttgggcgtaaaggcgagccaaagataaggcacaagttatcttccgaaagctgcacgcatctggtattcatcggcttgccattcggcattccgggtatcggcgacgaaattgaaggcgcaatacagcaagcaccacaaccgctacgacagtccatgctcagcccctctatttataaccaaatgaaagataacagaatttgtccaaagaaaaatccagatttaaaatgtggacgtcatcatgatcagacctgccctcagacattccgaagacaaggctggaaacagaagggacaacacagcacacttcccccctccgggcgacatgccatcgcctattctcgttgaacgcggagcggaaagcgggcgaacagtatcaccttttttgcaccagcaaaagtgacaattccacttgcctggatggcccggcgcgagtagttttacgcgatattttagataatctctacaacaggatctcctcgatgccaagagcgaacgaaatcaaaaaaggtatggtactgaactacaacggcaaattgctgattgtgaaagatatcgacattcagtcgcctaccgcccgtggcgccgccacactgtataaaatgcgtttttccgatgtccgcaccggtctgaaagtggaagaacgtttcaaaggcgacgatatcgttgataccgtcaccctgagccgtcgcggcgttgacttttcttatgtcgatggcaacgaatatgtgttcatggataaagaagactatacgccgtataccttcaccaaagatcagattgaagaagagttgctgtttatgcctgaaggcggaatgccggatatgcaggttctgacctgggacggccaactgctggcgctagagcttccgcagaccgtggatctggaaatcgtcgaaaccgcgccgggtattaaaggagcgtccgccagcgcacgtaacaaacccgcgacattaagcaccggtctggtgattcaggttcccgaatacctgagcgcaggagagaaaatccgcattcatatcgaagagcgccgttatatggggcgcgcggattaagtttcacatttttcggctgcgccccagggcgcagtctgccccttttatttattgactgttctgcaccaggcaagagaaacgttaaaaatttaacattttctgctcttaagatggcagaagcacgacttcgtcaactcagcacttctctttttcacgtttattcgccaagattattaaaagttgttatgttgtatcaatattctggagctgacgtgaccaaaaccaatcttattactggatttctcggtagcggaaaaaccacctctatccttcatttattagctcataaagatccggctgaaaagtgggccgtcctggttaatgaatttggtgaagtgggtattgacggcgcgctgcttgccgacagcggcgcactgctaaaagagatccccggcggctgcatgtgctgcgtcaatggattgcctatgcaggtggggctcaacacgctgctgcgccagggcaaacctgaccggttgctgattgaaccaaccggactggggcacccaaaacagattctggatttattaactgcgccggtttatgagccgtggattgatttacgcgctacgctctgcatccttgaccctcgcctgctactggaccaacagaacgtcgccaatgaaaatttccgcgatcagctcgcctcagccgatattatcatcgccaataagaccgatcgcgccacggcgcagagcgatgccgccctgcaacagtggtggcgacagtacggcggcgatcgtcaactgattcatgccgaacatggacagatagacggtaagcttctggatttaccgcgacaaaatctggcggaactgccggccagcgccgcgcattctcacactcatgccagtaaaaaaggactcgccgcgctaaatctgcccgcccagcagcgctggcgacgcagccttaatagcggacagggtcatcaggcctgcggctggattttcgatgccgataccgtgtttgacaccattggcctcctcgaatgggctcgtctggcgccggtgggccgggtgaaaggcgttatgcgcatacaagaggggctggtacgcatcaatcgccagggcgatgacctgcacatcgaaacacagagtgtcgcgccgccggatagccgggttgaacttatctcaaacacagaaaccgactggaatacgttacagacggccttgttgaagcttcgtttagcgacgcacgcgtaaggttgccaccgtttaaaaactatggcgaaatgacgatgaaaacccgctattccttgataattctgcttaatgccgccggtctggcgctgtttttgtcatggtatcttcccgtcaatcacggtttctggttcaccattgattccggcatattccacttctttaaccagaaactggtggaaagccacgcgttcctctggtgggtcgctattaccaataatcgggcgtttgacggctgttcgctgctggcgatgggcggactgatgctcagtttctggctaaaagaagacgcgtcgggccggcggcgcattgtgataatcggattggtcatgctgctaacagcggtggtgcttaaccaactcggtcaggcgctgatccccgtcaagcgcgccagcccaacgctctcttttgagcatatttatcgcgtcagcgagttgctgcacatcccgacaaaagacgcgtcaaaagacagtttcccaggcgatcacggtatgatgctgctgatattttccgcctttatgctgcgttatttcggcaaaacggcggggattatcgcccttattatatttgtggttttcgcgtttccgcgcgttatgattggcgctcactggttcaccgatattgtggtcgggtcgctcacggttattttgattggcctcccctggtggctgatgaccccgctcagcgaccgggcgatagcgctttttgagaattatctcccgggcggaaataaacaaattttaaacaaataacccatgtaattaacattaccttcagcgatagttttacatcgttgaagataatttatgatgatattcccccagcccatcatttttcggtcatattattcctctgcaaaatgaacaggttgcacgatttttaaacgatttgcgcttaatttgacccgtgctgatagctcacttttcgtatcataaattcttataaaaaatcacgcgaaatcgctcgcaatgacagcaacaatcgggtaatctcaaactcgttttgcctcgccagataattattctcattgcgaataaatttgtgcgttccgccacagatttgtgcacaaagaattgtctcaagctgtgcaggtaattagtctcatcacgtttggcatttttataacgatatttatcgttaaggacttcaagggaaaacaaacaacatggtcaaatctcaaccgattttgagatatattttgcgcgggattcctgcgattgcagttgcggttctgctttctgcttgtagcacaaccaccaataccgcaaagaatatgcattctgagacgcatgctgtgggcaatagcgatagctcttcactgcaagcctctcaggatgaatttgaaaatatggtgcgtaacctcgacgttaagtcgcggattatggatcagtatgctgactggaaaggcgtgcgttaccgcctgggcggcagtaccaagaaaggcgtcgactgttccagctttgtacagcgcaccttccgtgaacagtttggtttagagcttccgcgttcaacctatgaacagcaggaaatgggcaaagcagtttcacgcaataacctgcgtacgggcgatctggttctgttccgcgccggttccactggtcgtcatgtcggtatttatatcggcaataaccagtttgtccatgcgtctaccagtagcggcgtcattatctccagtatgaacgaaccgtactggaaaaaacgctacaatgaagcgcgtcgagttctgagccgcagttaatcttcatcaggcagcacctcccttggcttacctgatgagacgacataaaaagcactgcttcggcagtgcttttgcttattatcccttctgaacccgttttaccgaatagcgacgtgtcgcctcttatccagcctacaacacacgaacataggcctgataaacatagcgccatcagacattcaggtcgtttccgccaacgactactgcgacaatacgctttcctgcgcatcacagaaaagcatgactatccggggtaatccaggctatagtcttataaatcaaccagtttaaccggcatccgccttttaaggtcacaccaggaattatgcttacacgcgactcctcttccggtcggaaaatcctgcttacctgtatcattacggggatagcggcagcattacttattggtagcctgcaatttttcctgtcgtggcataaacgggatgttaaatacaatacgctcctttctgatgtacaacattacctggccagctatttcgccgacctgaaagccaccaccgatattcttcagccgttgacgatcaacacctgtcagcaggttggcgcagaactcacctcaagagccgcttttagccttaatgtccgcgccttcttattgattaaagataaaaaagtgttctgctcttccgccactggcgccatgaatatgccgcttcagcaactggtaccggatatagatatccgcaaagacgttgctatggcgattctgcccggcacgccaatgatgcccaacaaaccgacaatggtgatttggtatcgaaacccattattaaatgacagcggcgtattcacatcgctgaatattaacctgacgccctacttactctataccacgcgccaggatgattttaacggcatcgcgctgattgtcggcaataccgcgctgtcgaccttttcttcgcgtctgctgaccgtcgcggagctgccgggcacgccttcacgacaggcaactatcaacggcctgccgcttaaaatacagctttatgccgatagctggacctacaatgacttgtggtatgcgttgatgctgggctgcattagcggcatcgtagcggggtttatctgttactttatctatgccctccggacgcgaccgggcaaagagattttaacggcgatcaaacacgagcagttttatgtggtttatcagcccgtcgtcgatactcgtacgctgagcgtcaccgggcttgaagtcttactgcgctggcgtcaccctacggcaggagagattccgccggatgcctttatccactatgccgaagcgcagcaacttatcgtaccgttaacgcagcatctgttcgagctgatcgcccgcgacgcgcccacgttacagaaggtgatgcccgtcggtgccaaatttggcattaacatcgcgccggaacatctgcacagcgacagttttaaagaggatatgcaccggctcagggacgccctgcccgcgcaccattttcatatcgtgctggaaatcactgaacgcgatatgctccagcagtatgaagcggccaaactgttcgaatggctgcattccgccgggtttgaaatcgctatagatgatttcggtacaggccatagcgccctgatttatctggagcgatttactttagattatctgaaaatcgatcgcggttttatccaggcgatcggcacggaaaccgtcacgtctccggttctggataccgtgctgacgctctccagacgcctgaatatgctgacggtggccgagggcgttgaaacgccggagcaggcccgttggctacgcgatcacggtgttaattacttgcaggggtactggattagtcgtcctttacccctacaagatttcgtgctgtggatgtcggcgccttctgtgcctgaatggtagcccccttacggttttaacggattcacatcagacgcaacgtcacttattattcagcgaaacgcctgccggtttgcagcgggcaatacgataaggaaaccgccttcagatgattgcgcgcgtaatgcttctgcttgtcgcactggttagcgctggcgcccaggcccaggaaatcaaagaaagctacgctttcgccgtactcggcgaacctaagtatgcttttaactttgatcactttgattatgtgaatcctgctgcgccgaaaggcggtcagatgacgctttccgccattggtacgttcgataatttcaatcgctattcgctgcgcggcaatcccggcgtacgtaccgaagccctttacgatacgctttttaccacctcggatgatgaacccggaagctattacccgctgattgccgaccatgcccgctatgccgccgactattcctgggtggaaatctcgattaatccccgcgctcgttttcacgatggcacgcccattaccgcccgcgatgtggcctttacctttcataagtttatgaccgaaggcgtaccgcagttccgtctggtctataaaggtactaccgtgaaggcgattgcgcctttaaccgtgcgaattgagctggcgaagcctggtaaagaagacatgcttagtctgttttcattaccgatcatgcccgaaaaattctggaaaaatcacaagctcagcgatccgctttcaacgccgcccttagccagcggcccataccggattactcagtggaaaatgggccagtacattgtctattcacgcgtcaaaaactactgggcggctaatctgccggtcaatcgtggacgttttaacctcgacactatccgctacgattactaccttgatgacaatgtcgctttcgaggcgtttaaagcgggcgcatttgatctacggctggaaaacgacgctaaaaactgggcaacgcgctacatcggtaaaaatttcgataatcattacatcattaaagaagagcagaaaaacgagtcggcgcaggacacacgctggctggcctttaacattcagcgcccggtatttaaagaccggcgggtacgtgaagctgtcaccctggccttcgattttgagtggatgaataaagcgctgttctataatgcctgcagccgaaccaacagttacttccagaataccgagtacgccgccagaaattatcctgacgccgatgagctggtattactcgcgccgatgaaaaaagatcttcctcctgaagtcttcactcagatctatcagccgccggtctctaacggcgacggctacgatcgcgaaaatcttcttaaagctgacgccttgttgacgcaggccggatgggtgatcaacggacagcaacgggtcaatagcgtcaccggtaagcctctgacgtttgaacttctccttcctgccagcagtaatagccagtgggttctgcccttccagcataatcttcagcgtctgggcattacgatgactatccgtcaggttgataattctcagctcaccaaccggatgcgcagccgcgactatgacatgatgccgaggctatggcgggcgatgccctggcccagctccgatctacaaatctcatgggcgtcggaatacattgactccagttataacgctcccggcgtacaaagcccggtggtggataaactgatcgcgcaaattatcgcagcgcagggtgataaagcgaaactggtgccgctgggacgggcgctggatcgcgtgctgacctggaactattacatgctgccgatgtggtatatggcgcaagacaggctcgcctggtgggataaattctcccatccggcgattcgcccggtatataccatcgggttagatacctggtggtatgatgtcaacaaagccgccaaactaccggcagccaggaggtagtaagaatcaatgggcgcctatcttatccgccgtctgttactggtgatccccacgctatgggccattattaccattaacttttttatcgtgcagatcgctcccggcggccctgtcgatcaggcgattgccgcgattgaatttggccagggcggcgcgttgcccggcgccagcggcgaaggcgttcgcgccagtcatgcgcaaaccggcgtcggcaatatcagcgacagccattatcgcggcggccggggactcgatccggaggtgatcgcggagatcacccatcgctacggcttcgacaaaccgctgcatgagcgttatttcaagatgctacgggactatctctcttttgacttcggcgacagtctgtttcgcagcgcatccgtactgacgctaatcaaagacagccttcccgtctccattaccctgggattatggagcacgctgattatttatctggtgtctatcccgctggggattcgcaaagccgtccataacggcagtcgctttgatgtgtggagcagcgcgtttatcattattggttatgcgatccccgcctttctgtttgctattttattaatcgtcttttttgccggcggcagctactacgatatttttccgctacgtggcctggtctccgccaactttgacacattaccgtggtaccagaaaatcaccgattatttgtggcatattacgctgccggtgttggcgaccgtcatcggcggttttgccgccctgacgatgctgacgaaaaattcgtttctcgacgaggtgcgtaaacagtatgtcgttaccgctcgcgcgaaaggcgtgagtgaaaaaaacattctctggaaacatgtttttcgtaacgccatgctgctggtgatcgccgggtttcccgccacttttatcagtatgtttttcaccggctcgttgctaattgaagtcatgttctcgctcaacggcctggggctgctgggttatgaagcaaccgtttcgcgcgactatccggtgatgttcggtacgctttatatctttaccctgattggcttattactgaatatcctgagcgatatcagctatacgctggtcgatccacgcattgattttgagggacgataatgccgcgattaagcccggtcaatcaggcccgctgggcgcgtttccgccataatcgccggggctactggtcactatggattttcctggtcgtgttcagcctgagcttatgcgcggaactgattgctaacgataagccattgctggtgcgctatgaaggccagtggtattttccgctggtaaaaaattacagcgagcgcgatttcggcggcccgctggcgacaacggcagattatcaggacccctggctacaacggcaacttgagaatcggggctgggtgttgtgggcccccgtacgctttggcgccaataccattaattttgccaccacgcagcctttcccctccccgccttcggcgaaaaactggctgggcaccgatgcgaatggcggcgacgttttcgcccgcatcctgtacggcacccgcatttctattttattcggcctgatgttaacgatttgctccagcgtcatgggcgtactggcgggcgcgctacagggctattatggcggcaaagtcgatttatgggggcaacgtctcatcgaagtctggtcggggatgccgaccctgtttctgattattttactttccagcgtagtgcagcctaacttctggtggctgctggccataaccgtgttgtttggctggatgagtctggtgggcgtagtgcgcgccgagtttttacggacccgcaattttgactatatccgcgccgcgcaggcgcttggcgtcagcgatcgtgacattatcctgcgccatatgttgcctaatgcgatggtcgctaccctgacatttttaccgttcattttatgtagctccatcaccaccctgacgtcgctggattttctgggattcggtctgccgcttggctccccttctctcggcgaacttcttttacaggggaaaaacaacttacaggctccctggctggggatcgccgcctttctgtctgtcgccattctgctatcgctgctgatttttatcggcgaagcggtacgcgacgcctttgatcctgctaaggcggtataagatgacatctccattgcttgcgattgaaaatttatcggtaggtttccgtcagcaacagcacgtgcgtcctgtcgttaacgccatttcgttacaggtgaacgccggggaaacgctggcgctggtcggcgagtccgggtcagggaaaagcgtgacggcgctttccattctgcgtcttttgcctacccctcccgccgtctacctctccggcgatattcgctttcacggcgaatcattgcttcatgccagcgagcagacgctacgcggcgtgcgcggcaataaaatcgccatgatttttcaggaaccgatggtttcacttaacccgctgcatacgctggaaaaacagctctatgaagtgctgtcgctccatcggggaatgcgtcgggaggcggcaagggcggagatgatcggttgtctggatcgggtcggtatccgccaggcgagccagcgtctgcgcgattatccgcatcagctttccggcggcgaacgccagcgcgtcatgatagccatggcgctgttaacacggccggaattactgatcgccgatgagccgaccaccgccctcgacgtctccgtacaggcgcagatcttatctctactgcgggaactccagcgcgagcttaatatgggattgctgtttatcacccataacctcagcattgtaaaaaaactggcggattcagtggcggtaatgcaacacggcaagtgcgtagagaaccaacgcgccgacacgctgctctccgcgccgacccatccgtacacgcaaaaactactcaacagcgaacccacaggcgatccggttccgctccccgccgggcaggcgccgttgctggaagtggacaagctgcgcgtcgccttcccaatccgcaaaggcattctgaagcgcgtcgtggatcataatgtggtggttaacaatatcagtttcaccctgcatccaggcgaaacgctgggtctggtcggcgagtcaggatcgggaaaaagcaccaccggtctggcgctgttacggcttatccgctccgaaggccgcatcgtgtttgacggtcaatcgctggatacgttaaaccgccgccagcttttacctgttcgccaccgtatccaggtcgtattccaggacccaaactcatcgctaaacccgcgtttaaacgtgttgcaaattatcgaagaaggcctgcgcgtccaccagcctacgctttcaggcgcgcagcgagaacagcaggtgaaagcggtcatgatggaagtcggcctggacccggaaacgcggcatcgttaccccgctgagttttccggcggccagcgtcaacgtatcgccgtcgccagggcgctgattttaaaaccgtcgcttattattctggatgaaccgacctcatcgctggataaaaccgttcaggcgcagattcttgccctcctgaaatcgctccagcaaaagcaccgtctggcctatatcttcattagccacgatctgcatgtagtacacgcgctgtgccatcaggttatcgtgctgcggcagggggaggtggttgaacaggggcaatgcgagcgcgtgtttaccgcaccgcaacaggcctatacgcgtcagctactcgcgttaagctgacgcctaaaaaggattattgttagaaaaaggttccgctatcgccacgccgaaatttttcagccgacaggtggcggcaaactcatcctgacgattaacgaacaggcacggttccccttcgcactccagcacggagcaaggaacttcaatatcgcttagcgcctggctgagcttatgcatcactgaccacgcgctatcgcctgccggactcaacagtttaagcgccaccagactattctcggtgctctgcccgttttgcggaatcggttcaacctttgaccccgcaaaacccgccgaccagcgatagttttgcggcagacggtgaacaattgagagctgtaatgtattcactttctttccccggaagcacaattacttcacaatttgcttacatttatattaacacatcattgacaacccgtccttaaacagattgctaacgcccttctctccgtcagtggctctacagcaagcgggagttaaaatagttttaccgacgcggagatagcggcgggctatatgtacccgtttctgcgatctaactcaacctttttaactacaatgatgtgactttttacataaatggattttacataaaataaacataaaggaggaaaatgatgaattggtaattgatatacatcaactatgaaagccgtttggctttgccatcgtgtagcggatagcatcccccaacgccgcctgcgcattcttcggcgccattgagggacagcgcgcccgtcaccgttttttgggacggctggcgtagagataaaacagaatggaacaggcggcgcaaagcgcaatcgaccagatcatcggccacgcactggtaaaggtagccagcgacagcaacgcgccgacgatagcgccaataccaaagcggaaagtgcccgccaacgaagacgccgttccggccatatgcggaaactcatccaaaatgaccgccatcgcattggacgaaaccatcgacacacagccgacaaacgccgcaacgccgaccaccagcgcccagaatccaatgcccatcagcgcgctgaaaaccatccacaccgccatcgcaaactgaatccatagcccggcccgaaacatgtttagcgcccctacccgtctgacaaaacggctgttgataatcgtcatcacaaacagaaatacgatgttcaacgcgaagtagtagccgaaatcctgcggcggaacatgattaatttcgatataaacaaacggccccgcgctcaaaaaagagaacataccggcaaaactaaacccgctcgccagcatatagctcagtacgcgtttgtggcgaaacaacgcggcaaagttacctattgtggtacgaatatgaaaaggctgacgccgctcaacgggcagcgtctctttaatcagagcaaagatcatgactgacgccagaatcgccgcaatggccagtatccagaagatatagtgccagcttaaccataccaacacccagccgccgacaatgggcgccattaacggcgctatcgtagtgaccagcatgacaaatgacatcatgcgcgaaaactcttcctttggataaatatcccgcatcagcgcattgatgacgacgcttgccgccgcggccgccaaaccgtgaaagaaacgcatcacgatcagttgatcgatagtctgcgccaacgcacaggcgaccgccgcagcagcaaataccagcgtcccgcccaggatgaccggcttacgcccgaggctatccgccatcggtccatagataagctgacccagcgcaaaccccagaatataggtactgagcgtcatctgcgtgctaccggcaggcacgccgaattgcgcagaaatcaccggcagcgcaggaagatacatatcaatcgacagcggcattaacatggccaacaggccaaggataaagacaatggcaaaggaagagtgctgccgggtggtcacatcgaactcctgaatttaacgagatagttagccgacgctggcgatttcttcttcagtcaacgggcggtactcgccgggagccagattctcatccagcgtaatggcgccaatccgttcgcggtgcagttccacaacgcgattgcctactgcggcaaacatccgcttcacctgatgataacggccttcgctgatggtcagacggacctgcacaggcgttatcacctccagcgtagcgggtttagtgagatctttttcattatgcaactgcacgcctttcgcaaattgcgctaccgtatcgtcggccaccggcgactccagggtcaccagataggttttttcacagtgatggcgcggcgacgtaatgcggtgcgaccactgaccgtcatctgtcattaacaccagaccggtagtatcgatatccagacgtcctgcggcatgcagcttatacgccaccggctcatccaggaaatacagtaccgttggatgatcgggatcatcggttgaacaaacgtatccctgcggcttgttaagcataaaatagcgtggcccgtgttgctgcgctaagggattgccgtcatacgcaaccgcatgttccgggagcagtttgaaggccgcatttttaatgatgtcgccatcgacggtaacgcggttaccacgaatttcacgcccggcaatagcgcggctgacgccaagctgctgagcgataaatttatcaagtcgcatgtgtgtgatttagcctgtaataatacggaaatcgggcattctacccgaaaaaagggaattgctatccgctcagtatagcgggctaactatatccctcaagggaaatgattcatggcatactattcccggaaccgtttaacgtagtgagaccatgatttttacactccgcccctaccagcaagaagccgtagacgccacgctcagccactttcgccgccaccgtacgcccgccgtgattgttctgccgaccggcgcaggtaaaagcctggtgatcgccgaactggcgcgcgtcgcccgcggacgggtactggtgctggcgcatgtgaaagagctggtcgcgcagaaccacgccaaatattgcgcgctggggctggaagcagatattttcgccgccggactcaaacgtaaagagagtcagggcaaagtcgtgttcggcagcgtacagtcggtggcgcgtaatcttgacgccttccaggaggagttttcgctgttgattgtcgatgaatgccaccgcatcggtgacgatgaagacagtcagtatcagcaaatcctcactcacctgagtaaagttaatcctcacttacgtctgcttgggctaaccgccacgcccttccgcctcggaaaaggctggatttatcaatttcattaccacggtatggtgcgcggcaacgacaacgcgctgtttcgcgactgtatttatgaactgccgctgcgctatatgattaaacacggctatctgacgccgcctgagcggcttgatatgccagtggtccaatacgatttcagccgcctgcaggcccaaagcaatgggctgttcagcgaagccgacctgaaccgtgagctgaaaaagcagcagcggattacgccgcacatcatcagccagattatggaatttgcgcaaacgcgcaaaggcgtgatgattttcgccgccacggtcgaacatgcgaaagagattgtcggtctgcttccggcggacgacgcggcgctgattaccggcgatacgccagggcccgagcgcgacgcgctgattgataatttcaaggcgcagcgttttcgctatctggttaacgtctcggtgctgaccaccggctttgacgccccacacgttgatctcatcgcgattctacgtcccaccgagtcagttagtctttaccaacaaattgtcgggcgtggtctgcgccttgcgccgggaaagaccgattgcctgattcttgattacgcaggcaacccgcacgacctgtatgccccggaggtcggtagcccgaagggaaaaagcgataacgtccctgtccaggtattttgcccggcctgcggctttgccaacaccttctgggggaaaaccactgccgacggcacgctgattgaacactttggccgtcgctgccagggctggtttgacgatgacgacggccatcgcgagcagtgcgattttcgctttcgcttcaaaaactgcccgcagtgtaatgccgaaaacgatattgccgcccgacgctgccgggaatgtgacgctattctggtcgacccggacgatatgttaaaagcggcgctcagactcaaggatgcgttagtcctgcgctgtagcggaatgacgatgcagcatgggcaggatgagaaaggcgaatggctgaaaatcacttactatgacgaggacggcgcggatgtcagtgagcgcttccgcttgcacacgcccgcccagcgtaccgctttcgaacagctatttattcgcccgcatacccgcacgcccggcgttcctttacgctggatcacggcggcggatattgtcgcgcagcaggcgctgttgcggcatcccgattttgtggtcgcgcggatgaaaggccagtactggcaggtgcgtgaaaaagtgttcgactatgaaggccgcttccgccgggcgcacgaattacgtggttaatcgtacttttcattgatgtaacggcgatttgagtatagaatctcgcccgcctttgcatacgcaaagcagatcacttacctgttgctgggtcgcctgtagcaggaattattaaagagagatttaaatgtttactatcaacgcagaagtacgtaaagagcagggtaagggtgcgagccgccgcctgcgcgccgctaacaagttcccggcaatcatctacggcggttctgaagccccgattgctatcgaactggaccacgaccaggtgatgaacatgcaagctaaagctgaattctacagcgaagttctgaccctcgttgttgacggtaaagaagtaaaagttaaagctcaggctgtacagcgtcacgcttacaaaccgaagctgactcacatcgacttcgttcgcgcgtaatcgcctggaagttgaagaaaaaccccgccccggcggggttttttatgcgtttaattgaatttgacgacatgcagagcaacgagaaaccactttgcttttctgctttcttacacctcgccacattcaattagcgcctcccctaatcgagaatctgtagtttccgccgcggtattcatacctttaagccgattgaataatgcccgttgacgaacgctggcactttccggtttccatggcaaaattcgtattggtatagtttgcccgtcattcaacgcatcaaataccttttcattggtcagtaagtcgccgcagctccatgtcttgctatcaaactgaaaatcaaataagacatggagctccagttcatctacacgcacttgacgctttgcattatcgatgcgtatttccaccttctctttatgcgtcaaagttgcatcaagattgagtccataccgtttcaactgccccttgtcgtaatagtaacgtatgctggaccaagttgatttaaaagcaaatccagtaatgaataaaccacttaacaagaacagcgggcatatgaacaagctcagtaaccagttggcaccataagtataaaacagtaccaacgagagaacggtgaacaccatgccgagcaccaacatcatcaaaaatgcgacaatgtgcgcatacaaaacctgccgaaataaactgaaattaacaggcggcttctgtcgtattcctttactcactacggcgtccttttatgtcgtatgcctttatttctcgcccgacgtgcgtcgctgcaactgctcgcgcagattcggcggcgtccctttgatagtcagggtatcggtcgccgggtcccagaaaatccgctcgcccagtagcatcgcatcaaagttaatcgttaacccgccgccgctgccggcatatttggttaactggcgtagcgtactgcgatctgccgggaagctctcttccagctcatagcctttttcggcagtaaattcgctgaagctgacttcactgacgccggaaagctctttagacagcgattccagctcaatctcttccccggcttgtaactgctcgttgcagtagctgtacacctgctgacgcacgttctgacgttctgctttatccaactgcgcttctgcggtgaaatcatccactgcctgcaacaggccgcgattctgcgctttggcgttcaacccttcgctggcgccgaggaaatccataaagaagtcagcgaccttgcgccctacccgacctttgagaaacgtcaggtagcgggtcgattgcggattagtttcccactcggtaagatcgatacgcgccacgatatccgcatgattgatatcaagataatgcgtcgggttaatgtccagattttcattgacccgcatactgctcaggttgttcagtaccgtaaccagcagatactccaccgccaggtaacgataatggcagaacaatacaatgccgccgtccgcaaagggatatttcgccagttcgtcacgcaggcgtccggtcgccgcccggctaaaggcaagaaaatcttcttccccctgacgttgcaaccgcagcgcttgcgccagttcactctcttcattaaacaggccatacgccttattcttggcgctatagacccgatgcagttcagccaccatctcgacaacggtggttgtcggctccagcaatgaatcgcgcaagaccagctcaagattttgctcatcgcgcttgataagctggtgcagggcaatctggttgatatccagactcatgataaactctcctttaagaccgggcggtattcaaccaccgcctgccggaagacgcaagcaatcgccctgtcatttcaggcgttatccgtaacgcgaatgatttaggggataaaaatgcagaaaaaaaactgttgctacggtaatatgttgccctttcatgaacaaacagattttgatttatgccacaactctcccgctatagtgatgaacatgttgaacaattgctgagcgaactgctcagtgtactggaaaaacataaggcgccgaccgatctttccctgatggtgctgggaaatatggtcaccaaccttatcaacaccagcgttgcgccagctcaacgccaggcgattgcgaactcttttgcccgcgccttgcagtcttcgattagcgaagacaacgcgcactaaaaagccgactccggagaaacaagcgacaggtatggtaactcatcgtcagcgctaccgtgaaaaagtctcccagatggttagctgggggcactggttcgctctgttcaatatactgttggctacgttgctcggcagccgttacctgtttgtcgccgactggccgacaacgcttgcgggtcgcatatactcctacctgagcattgtcgggcactttagctttctggtgttcgccacctatttgcttattctttttccgctcacgtttatcgtgatgtcccagcggctgatgcggtttatatcagccattctggcgaccgcgggtatgacgttgttgcttatcgacagcgaagtctttacccgttttcacctgcatcttaatcccattgtctgggagctggtcatcaaccctgaccagaacgaaatggcgcgcgactggcagcttatgtttattagcgtgccggttatcttattgattgagatgctatttgcgacatggagttggcaaaagctgcgcagtctcacgcgccgtcgccatttcgcaaggccgcttgcggcattctttttcgtctcctttatcgcatcgcatcttatctacatctgggcagatgctaatttttaccggccgattaccatgcagcgggcaaacctgccgctctcttatccgatgacggcgcgacgttttcttgaaaaacacggtctgctggatgcgcaggaatatcagcgccgtctggtagagcaaggcaatccggaagcggtctccgttcagtacccgctcagcaatttgcactatcgcgatatgggcaccggtcagaatgtgctgctcattaccgtagacggcctgaactattctcgctttgagaagcagatgccggagctggctacatttgccgagcaaaacatcgacttcacccgtcatatgagttcagggaataccactgataacggtattttcggcctgttctatggcatatcgccaggctatatggatggcgtgttatccaccagaacgcctgcggcgctcattaccgcgttgaatcagcaaggctaccaactgggactgttttcttcggatggcttcgccagcccgctttatcgtcaggcattactgtccgatttctcgatgccggcagcgcaaacgcagtctgatgcgcaaacggccagccagtggatagactggcttgggcgctacgcacaggaagataaccgctggttctcatggatatcgtttaacggtactaatattgatgacagtaaccagaaaaattttgttaagcgttacgccagtgccgccagcgacgtggatgcgcaaatcaatcgggttctgaacgcgctgcgagaggccggtaaattcgagaatactgtcgtgatcattaccgcaggacgcggcataccgttgacgccggaagaaaatcgcttcgactggtcgcaaggtcatctgcaagtaccgctggtgatccactggccggggacgcctgcgcagcgtattaatgtgcttaccgatcataccgatgtgatgaccacgttgatgcaacgcctgttacatgtcagcacgccagcgaacgaatattcacagggccaggacatctttaccgttccacgtcgtcataactgggtaacggcggcagacggcagtacgctggcaatcacgacgccgcaaatgaccctggtgctcaataataacggtcattatcagacctatgacttacacggcgagaagatcaaagatcagaagccgcagctcagtctgctgctgcaagtgctaacagaagagaaacgttttatcgctaactgattaattataaatcagttagcaccgtttccccttgcattcgcgttggaaagaggtagtattagcacccacaagtcggcacgtagcgcagcctggtagcgcaccgtcatggggtgtcgggggtcggaggttcaaatcctctcgtgccgaccaaaattccccttaaaagccagcctgccagggctggtttttttatatatccaatttgcaaatggtgaaatgatggtgaaatagctatcgaaggtcactgcaaattgacttcaagctccctccaacgcgaaaagttgaacagatgacttaaatacattgattagtcatccttaaccagtagaatccgccacgactggtaactattcaatacacgcactatcgaacgatcgccagtttgccgcagcccgttcttgcatacaatgtggctgcggcacaccatcacatcagaaatttgaaaatcagggtaaacctgtcacttaacctgaagcaggtcttcatagcgggtggtatatcgggatgacagtatgtttctcttcatagcccactgttgctggataccctccccggcaaagtacagctttccccagcccttctttgcattcaggtgatccagtacttccatcggcttctcgctaccggcgcgcggcgcgttatcatcgaaaaagtttcgccgcgccctgactgaagaagtctcccctatttcacctgtacatcatccgtactgtctgatgttgttcgtccgggaatatctttgtcgcaccgcacctcattcacctggtgcatcagttacgacgccactgaacgttcagatagctccccagcatctcctctacaagaggtcgcaggccatccaaaaatgtctttttcgcgctctccatcgctcttgctccgatagtgcgctctgcatcggtattaccgaccagcccagacggtctcagctctgtgtcagacagcatccggtacgtttcctcataatccgatatttgcttttcacgaagcgcgttaacgcgttccggcgctttgcgctccagcactctgtgtaacggcccccactgcagtatccactccctgaactcgcttttttcagcggctttcacctgaagctccgcgtcctgaaggtctgtaaccgtcacgccggatacgtcaaagaaacgcatttctgccgtcacgctggtcagcccgagtgatttcttcagcttattctgatacgccagccagacctcaatttcatcaacgagagccagcgttctgaccttttcccgggcaatctgttccagttttcccagacggaacatctcacgccccgtggcaaccagcgccgcgagatcgttatcgtattgccctttttctgcattatgtaccagctgtacgttcttcatctggtgcaaaaaaaatgtgacccggtcctcgcagcttgaggttgcctctgttgccatagcaaaggtgtttgctctcaacgcctcatcttcagccagttgtgccagccaggacgatatctgtgccttaaaccccgcgtcctttatgaagttttccgtctcactcagtctgtccaggaagaggctgaaggcgtcggcgttatcttcctgtccgaacatatgccatctgtctgcaggagccggttccccctcccgggcaggcaccagccagtcagcggccgccaggtgcagtgcccgagtttcccggggggcggaggctcccgccatatcgaattgtattatggggcctgaatagccaggcgcgctggtgatctcccgcagcgcctgcaaagtacgttcagacagtgggttcccttccagatttacggttgtctctgaagacagatgaatgagactttccggcaggcgggtcagctggttacgatagaccgacagcgacagtagtcctgacggcagcatcggcaggctggtcagccggttaccagataccatcagctccttcagttctgacggcagcaccggcagactggtcagccggttaccagatacaatcagctccttcagtcctgacggcaacgccggcaggctggtcagccgattattataggcccacagcttatataattctgacggcagcgtcggcaggctggccagttggttatcagataccgacagctcctgtagccctgacggcaacgtcggcaggctggtcagctggttattataggcccacagcttacataattctgacggcagcgccggcaggctggccagttggttatcagataccgacagctcctgtagccctggcggcaacaccggcaggctggtcagttgattaccaaagatccacagcttacatagtcctgacggcagcgccggcaggtgggtcagcgggttactaaagatcgacagttccagtagtcctggcggcagcaccggcaggctagtcagctggttaccagagacctccagcgtccgcagttctggcggcagcgccggcaggctggtcagattattatcaggaataaccagtgtggtaatatgcgcgggtaaacagtctggcaaggtggtaagacctgattctcccacgttaagcactgcattgccattattcaggcaggcacgcattttctgtaccactgctgcacggccgcgtgactcttctgcgggtgcagcccttctccacgctgaccagacagcatcatactctgctggcgtctgtggagccgttgtggcagggaggaaggatgtcctgaatgtcccggatgccccttccgcgtgtcctgtgccctcctcaccctgtgctgtgtccagggtgaggcgatgtgtttcactgtacccctggcaatttacggtatagttcccggcatcatcaagggtgactgacaatatctcctgactgtcttcatccagaatacagaagtaattttccccgtgctggccggaatgaatgctttcctcccatccggcatacgcgagcgtcctgagcagttcaaatctgctgaccacatcctcccgcgtcgttccggccggcgggtgacaaatcgtccagatgcactccagcgcttcagtctggtgcgttgagcaaaaaaattccttcattttttcccaggaactcatttcagggggggtatcagaccaggcaatacgataaatgcggcgattactgatggtggcgggaagacatccgcttccaatatgaaagggcataacaaaaaacctttataaatttacatatagtatctgtccggcagacatcatctcttcctggtcttaatttcacaataaggttatcggcggattcatggccgtcctgacatggcgggcttcagaaggtgcagaagaaaaatccgttatgatgaccggatggcgggactgtcattttacagctaaagtgtcgattttttcagggtcgctttccacgatgaccagatcatccggtatcaacgcccgggcgttcaattttcgattctgcctgcctgcacagctcttccggcgaataaaccctttgaacgactttaccgtctttaaactgccagcagcatgaatatcagcgcgacggttttcatccgtatcaggcaactctgcaacgctctggccagcaggccacagcccggaaacatcacgcgtaatacacgtaataacatcgttatcgtcgtaggtaattttcagcgtgtctgctgaaaataattgctggcacccataccagtcctgaccatcctctgatttaagatacgccgcatcggcgaataatgtgtcatctggttccggtgcatacggaatgaaatttttaatatttaaaaactgtttgttctttttattttttttccgctgtcataattattccttcttatacacttggggctgtcacccacgtatcaccaaccagatactgaatgggacgttgtcacccgaatagtcatcgcgccacgcactcccattacctcaatcactgcgccagcgagacagatagtaccgcagccagtatccgtgatgattttgttataagcgtaagaccaggagccacgacacatccagtaagggtgattgaatgcgccctgagactccagccagacgataaactccgccgtcgtccacggattatcatcacagccgatagtaactgcgccatcaaacgctcgcgcggcaccgatacgacgcacaaacaaatccttgtccggaatatcgccgccattctgtgatttttataatgcatcggcggcacgacttatggtttctcgcaaaccaacgtattcgataagaccgtcaacgctttttcctgacagcgccgtcagggtttcgtccagcggctgcttgcccgccagtttattcagtaccgtggtggcaaagttcggatcatttcccaacgcgtcagccagttcctgcagggtgtccagtggctccagtacggaaccaaccagcgcggcaatcagtttgcggacaaactccgcgtttgttgtctgaagccctttagcatcgcctggcggcgtcggtgtggtcggcgttccagtgaatgccgggctgtccagcggcgctttggtccgtacctcacccataacggtttttaccgcctttggtgtggccgccagcgcttcgctgtcactgtccgtggcactgcttaatttaacgataccttttttcgtcaggcttgcatcttccagggaaatcacgtctgcgatatcctcggcccgtttcgcggcctcttcggctctggttgccaattctccggctgcagctctgctttgcgctgccagtgatgcgctggtatcagatgcggcggcgtgggtggatgcctccgatgctgatgacgaggcggctgccgccgttctggctgtgtcagccgacgccgcgctggctgatgcctccccggcttttgtggtcgccgtacctgcgctgctctccgcagatgctgcggatgaagctgccgaccaaaattccccttgaaaaccagcctgtcagggctggttttttttatgcctacaattaaaaagttagctgatgccagagacgttattttgcatgaactgattttgcatgaactgattggacatctttcctgtgcagtggtcaacgtaaagtcaatgcaggcaaataacgtaaaccatgtttgtactaaaacagaaaaagcgcatctacaccctatgctggaagaaatgtttgtagtggcaggtaaatgagtaagcaatctgtcgcagcaataataaaacgttctggtaaggtaaacggcctaccacttctttgtcactaacaattagcctccctgtcgccatagggtagataacgatcggctattcacaacacgttttgtagacaacgtacggtgattaattactccttcagccagcaactcgctaattgttattcaacttcagaaattataactaattgaagcacctacaaaattatgccctgaatttttatccgtaagtgatccattcgagaaatgccggatataagcttctgtagaaaaagccccaaagttccagccaagaaacgctttttctccaaaggtaaatgcagaattgacacgcatatcatctcgcgacttagattttatataagcccccagaccaataccggtatagataccagcgaaatgaaccagcgccacatccttcgagatacccaatacgccctggttatatttattgcagggaacgctgccagaatgtttactgcaatcatcgctacccttagccttaaatcctcctaactccagattatttcttgcctgtaaaaagaaaaaatcgctgggttcactgtatgtcagaaaagccgtatataagtgctcaacccctcctcttcttatactttctcccgcagcaaaagagatctgatgcttgttgcccttgccaaaaaaaacattatcattagcagaacatgcgaatgcacaaggtaataatagatatataaatattctcttcatatacactccaccaccatttcaatgtcaatagttatttttaaccggctaacatatttaaaattttctacgccacgcttacgctcacagaaacggctgatatagcatccacactacgttctccccttgagtcaccccaacgggtgctcaaaacgccgcgagtgttgttcaggcacatccaggataagttataagtgaatgacgctcattcctgaccacattttcatttatgataagaatatcgtcagaatctctttatcgcataaaaatacctctgctattgacttaatatttaatttaacagatgtcgcggtttattcgttctgctcagatgtatttcattgacattaataaaaccataaataaattcagttaaaataatttgttaataatgacaagctttagacgctatgacttttaataaggaatttcctgccagtaaagatagtctggacttacgggtgcaatggcgcagcaacatatgccacacttctgttatgtcacattgtccgaaaaaagcgtccagaccagtattcaacttcagggagtattctgttttctctcacaacgggttgttttatcctttctatcgttcagctaattactcgcctgtcacaggttttactacttacccatgcactaattagggtaaaatttacgcgcttgacaatgtggcaaatctggacgatttccgcgctgaaaacaataatcattctaataaaactcaggagatacagcatgcctgaagtaacaccttttcaggtgcttattgtggacgaccatccacttatgcggcgaggtattcgtcaattactggaactggacccggcttttcatgtcgttgccgaagcgggtgacggggcgagtgcgatcgatctggcgaatcgcattgagcccgatctgatcctgctggatctgaatatgaaaggtctgagcgggttagataccctgaacgcgctacgccgggatggtgtgacggcgcaaattattattcttaccgtctcggattccgccagcgacatctacgcgctgatcgacgccggcgccgacggttatctgctcaaagatagcgatccggaagtgctgctggaggccattcgcaaaggcgctaacggcggtaaagtctttagcgatcgggtcaatgaatatctgcgtgagcgcgaacggtttggcgcgcaggaagatccctttagtatcctgaccgaacgagagttagatgtcttgcatgagctggcgcaggggctttctaacaaacagattgcgtcagtactgaatatttctgagcagacggttaaggtgcacattcgtaatctacttcgcaagctaaacgtgcgctcacgcgtcgcggcgaccattctatttttacaaacacgcggaatacagtaacaagccaggcccgatggcgccacgtcaccgggccgtcagggtcttatttctcctgcgccagccggatactgcgctctatcaccgcccgccgggcgtcacccgccggcagcagtttcagcatcatctcccaggccgccaccgcctcgccaaagcgccgctgctcaaaggcgttaaacgcatacaggcttaacacccggatatccgtgtggtcgcggctcaccagctgacgcagcagctccccgccgcggcggttatcctccgggtcggacgagcgcgtcagcgcctccgcgtagcccagcgccgcatcgctgtttttcggggccagacggtaggcgttcgcatacgccccggtggcggtaccggcattacccagtaccataccggtgcgccccagcatgagccagccctcaacattgccggcatcattctgcaggcgggtgcgcagccccagcgccagccgcgccatctcctcttcattcagcggctgcgccgccgggtccagcgcccgcgccagcagcccgggcgtctgcgccgttgcctgctgccaggccctgacctgctgatagctgccggtcagggcgtagctgccggcgccgaccgccagcgcaatgacggcccccggcacgtaaacgccccacccggcgcgcgcgccgcaaaccggggtgtccgccggcagcggctcccggcgcaggcgcacccgccggcgcgtgcgggcaacgattatccacccgcccgctacgatggcggccagcggcagcacccacagcagcaccgtcaacggggtcagcggcgggtcgtaggtgacgaagttgccgtagcgcgccaccatgtaatcgatgatttcctggcggctcttcccctcctgcatcaggtcatacaccctgcggcgcatgtcggtggctatcatcgcgttcgagtccgcaatgctgttgttctggcatttcgggcagcgcagctgctccgtgagctggcggaactgctgctcctgcgcttcatctttaaacggcatcacgtcggtggtcgcccgcgctgacccggagataaccagcaccagcatcagcatcaccatgcccggtaacagtctcattgcgccgcctcccggctgtatctgtcccacagcggtttcagttcactctcccacacccgggcattcaaatcgcccgcatggcggtagcggataatccccctgccgtcgatgaggaaggtttccggcgcgccgtacacgcccaggtccagccccagcatcccgtcgctgtccgataaactcagcgcatacgggttgcccagttcctttaaccaggccaccgccttcgcccggtcgtccttatagttcagcccgaccacccggataccctgcgcagaaagctggttcaggtactgatgctcggcgcggcaggtcgggcaccaggtggcccagacgttaagcagcaccggtttcccctgcgtcagcacctccgcctcatagtactgacccggcgtctccagcgattccaggcggaacgccggcaccggcttcccggtcagcgccgattcgagattcgtcgggtcatccccctgcgcgttgcgcgtcagctgccacagcagcgccgcggcaatcagcagaaaaatcagtaacggtaataacagtacgttgcgtttcatccggcctccggcaatggtttacggcggcggtagcgcgggtccaccaggcacagcagcccgcccagcgccatcagcagccccccggcccatatccagcggacaaacggtttgtagtacaggcgcacggcccacgcgccgttgtccagctcctccccgagcgcggcgtacaggtcgcgggtcagcccgccgtcaatcgccgcctcggtcatcaccatccggctggtgttgtagagccgtttctccgcgtgcagcaccgcctccggctcgccgtggcgcgtcaccccgatgagggccaccccgccgcggtagttgggcccggtgatgtcccgcacctcccggaaggtgaagcggtagtcgtgaatggtcacgctgtcgcccgcccgcatccgcacgtcacgctccacgctgtaattctggctgaaggcgatgccggtaatcgtcaccgccagcccgaggtgcgccgccaccattccccagtagctgagagaggttttcgtgccgcgggacacgcgctgtacggcttcggccaccgccagcaccgcaatccagcaggccatcgccatccccaccgccgtcatggcgatgattttatcttccagcagccacggcaaaagtaccgacagcaccagggtagtgacaacggcagcccacagcagtttcctgatgttacgtggccggtcccggccccagcgcaccagcggccccacccccagcagcagggcaaaggggaccatcagccaggtgaacatggtgttaaagaacggctcccccaccgaaatgctgcccagccccagctgtttgtgcaccagcggcagcagggtacccagcagcaccaccagcatggcggccatcagcaggacgttgttgccgagcagcagcgactcgcgcgaccacagcgcgttgttcacccgcgaacgcaccctgtgcccgcgcacggcgaacagcagcagcgagccgccggtgaccagcaccataaaggcgaggataaacattccgcgcgccgggtcggaggcgaaggcgtgcaccgacaccagcaccccggagcgcaccaggaaggtgcccagcaggcacagcgagaaggcgcagatggacagcagcagcgtccacgccttaaagccggcgcgctgttcggtgaccgccagcgagtgcagcagggcggtgcccgccagccacggcataaaggaggcgttctccaccgggtcccagaaccaccagccgccccagcccagctcgtagtaggcccacgccgagccgagcacgatgcccagcgtcaggaacacccacgccgccagcgtccacgggcgggcaaaacgggtgaacgcgctgtccagacgcccgctcagcagcgcggcgatggcgaaggcgaaggccaccgagaagccgacatagcccatgtacagcagcggcgggtggaaaatcagccccgggtcctgcagcagcgggttcaggtcgcgcccctccaccggaaaggccggcagcgtgcgggcgaacgggccggaggtgaacaggatgaacgccagaaaaccggcgcagaccatccccatcaccgccagcacccgggcgacgatatccgccggcaccggccggctgaacaccgccaccgccagggtccagccgctcatcagcagcacccacagcagcagcgagccctcgtgcgccccccaggtggcggccacccggtaccacaccggcagctgcgtgttcgagttgccggcgacataggccacggtgaagtcgttaaccacaaaggcgtgcaccagcacgaaaaacgcgcccgccacgcagatgaacagcagccaggcgaacaccccggccgacgccatcatccgcgcgtcgccgcgcgccacgccccacagcgggtaaacggacagcagcagcgccacgccgagcgccaggcacagcagcgcgtggccgtattcaggcatcatgatgaggtgtccttatcagcgcgttgcgggcggcggtggttttcctgcatcgccttttccacttccggcggggtgtagttctcgtcatgcttggccagcacctcctgcgccaggacgtggctgcccttctccagggtgccctgcaccaccaccccctgtccctcgcggaacaggtccggcagtatcccctcatagctcaccgtcaccgacccttcggcgtcgtagaggctgaagttcaccttcagcgagtccgggtcgcgcctgacgctgccgggcatcaccatcccgccgacgcgcaggcgctggcccaccgccggcagctgctgcgtctcgcgcttgccgtagaggatttcgccgggggtatagaacaggtcgatattcgcgcgcagcgcgtacaggaccagggcggtggtcagcgccaggcccgccagcaccgcgcagaccacccatagccggtttttacgtcgcaggttcacgcggcctcctgttgcgcctgtgcggcacgcatccgcgcctcgcgcgcccgctgctgcgccacgccgcgcagaatggcccggcgctgcagcaccgtgtgcagcgccagcagcaccagcggcgccacggtcatcgccaccgccagccagacaaaaaaggcgtacccgcccatggcgaaaaaatcgctccacgatgaaaatgccggactcaccggtgcccccttttcagtatcagttcgctcacccacgggcggcgtttttccatcagtaaaatcaggttgcgcatccgcatcagcgccagcgtcataaagagcagcaggaagccggcgatggcccagcgcagcggcgagcgcatcgccgggtcgatactctgctgcatccgcgtcgagccctggtgcagggtgttccaccactcgacggaatagtggataaccggcaggttcaccacgccgaccagcaccagaatgcccgccgcgcgcccggccattttacggtcgtcaaaggcgtgccacagggcgatgaccccggcgtagagaaacagcagcaccagctccgaggtcaggcgcgcgtcccacacccaccaggtgccccacatcggtttgccccacgccgcgccggtgaccagcgcgatgaaggtgtacaccgcccccaccggcgccatcgccgcgacggcaaggctggccattttcatctgccagaccagcccggtgaacgccgccaccgccatcgccgcatagatacccatcgaccagatggccgccgggacatgcaggtacataatgcggtagctctccccctgctggtagtccgccggggcgaaaccaaagccccggacccagccggtggccagcgcgatgatgccggctgccgccagccacggcacgagcctgccgcaaatctgatacagccggggcggcgccgccagctgatgaagggttttccacatcgttgtcacctgacctcctgaaaccagtaaaatgtccgtcgcgccggggcgctactgcacgctgaggcgcagcgccgccgcggtggcgaacgggcttaacgtcgcgctgcccgccagcagcgcccccagcaccgccagatagccgtcaacgggtaaatgcatcgatgccgcgtccatcgccgcggtggcgaaaatcagcaccgggacactcagcggcagcaccagaatgcccagcaggacgccgccgcgccgcaggccggccgtcagcgcgacgcccggcgcggcgagaaaccccagcgccggcgtgccgagcagcagcgtcagcgccatgattttccagccgtacacgtccatccccagcagcagcgccaccagcggggagagcatcatcagcggcaggccggtcaccgcccagtgggccagcaccttcgccagcaccaccgccggcagcggcaccggcagcagcatcagctgctccaggctgccgtcctgcaggtcgtcgcgaaacagccgctccagcgccagcagcgaggccagcagcgccgccacctggatgatgcccggcgcgatacgcgccagcagctgcggctgcggcccgacgcttaacggaaacagggtgatgaccatcaggaagaaccacagcgggccggcgatgtccgcgccgtggcggaacgccacgcgcagctcgagacagaagacacgccacatcacagcccggcccccccgccggtcagcgccaggcggcggacggtgtccgcggcccccggcagcggctggtgggtggtgagaatgaccatcccgccctgcgccgtgtgcgccgccatccgccgggtgaggcgcgccacgccgttaacgtcaatggcggtgaacggctcgtcgagcacccacagcgcggcgcgggtcagccacaggcgggccagcgccacccggcgctgctgcccggccgagagctgagcgaccggcacgtcctcaaatcccgccagcccggcctgcgccagcgcctccgggagacgcgcgccgtcgccggggtggaaaaagtgcaggttctcccgcgccgtcaggcgggatttaatccccggctggtgccctatccacagcaggctgcgatggaagctgtcgcgcacgcggcgcaggggctcgccctgccagtacacctccccgccgtccgggcgcgccagcccggtcagcaggcgcagcagggtggtttttccggcgccgttgccgccggtgacctgcacccactccccggcgtccacggtgaacgacagcccgcgaaacagcgtcctctcgtcccgttcgcagtgcagatctctggcttcaagcattcccactcatcaacgtcctgtcagaaacctggtttaacatcacgcatatccggcagtttatgcgcgatccctttgtggcaatcgatacaggtctgtccgtcttttaccgcctgatcgtgcattttcgccgcgacgcctttttgcgcggtcagatccataaagtcgaaattgtggcagttacggcattcctgcgagttgttgtctttcatgcgccgccactcattttgtgccattgtcaggcgatgagcttcaaatttctgcggtgtatctatcagcccaaataccttcgcatacagctctttactggctttgatcttacggatcatcttcggcccccactcatgcggcacatggcagtcaggacaggtggcacgaacgccactacggttgttgtagtggacggtttccatatactcctcatacaccgtgttgcgcatttcatggcagctaatacaaaactcttcggtgttagccttttccattccggtattgaagccgccccagaagatgatgccgccgataaaaccgattaacagcagcgtccccagcgccaggcggctggggctgcgccaccatcgccagacgcgctttatccagccgggtttacggttagaattttccataatgacctcttatttcccgtaaccttgcgagggggtaaaggtattgtcgataatcggcgcggtatcagactgcggtacgtggcactgcaggcagaaataacgacgcggcgcgacgttgcccgacactttaccgtcactgtccataaagtgcgtcgggctgatacgcggcgcgcccgtcgtacgataactttccacgccgtggcattgcagacagcggttggtattggtcgtcacctggtagccctcgacgctgtgcgggatcatcggtggctggttgacgtaatttagcggcatacgctcctgctctttcggcatacgaatcgccccttcctgcgtcccggatacttccggcgactggctcagatccactccgtttgccgcccaaaccgcaccacttaccaccagggcaagcgtggccatccattgacacagcgctttcatcaggtcatggcttttcattgtttcgctcccgaactccatcgcatttacacttcatccttcgagctgcctctttgttggctgcgctccaaaatcccagtcgcatcgttatctatgcccctggggatttcctcgcttaccgccgcgatgcatcccgaatgatgttatgtatcgttattgtaaaaacatcctcagaacagacatccacgcagcggccgcaggtcatgcagtcgcggtgggtgacctgcgccgggctttgctcatccagcaccggcgcacgtagcacatgcggttccgggcaaacatgaaaacaatccatacagcgattacatttttcacgttttttggccgtcacggtcactacgcctttactgcccagcacgccatacagcgcgcccatcgggcaaatatggccgcaccaaccgtgctcaacgactaataaatcaaataaaaacaaagcaataatcagcaacgcgccgctactaaatcccataaccagactacggcctaacagcgacacgggattaatccattcccacagcagcgtgccggtcaacgccgaaccgattaacaccaccaccagaaggacgtaccgtatatggcgtggaatcgtcgcagactggttcaggtcaaatttcctgcgcatccagttagccaaatcggtaacggggtttagcgggcaaacccaactgcaaaatagtcgctttcccgccagcgcatacagcacagcgataatcactgctcccgtcagcgccacggtagcgggaagatgtccactggcgagactttccagggtaatcagcggatcggtcaacgggagggtatcgaacagcaaactactgctgtagttgccatgcaaaacccaaaagcccagccacgggccgctgagaaacatccccagcaccataaactggctgatacggcgtaacaccagccagcggtggctacgccaccagccttttttcgcccgcgcttctcgcccggcgtcgcgtttacgatttgccatctttcccctccagccagccgaagcggtaatggtgtcctaactcccctttcgccaatgacaacggcaacacttttatcgctggttgctccagtacgcagactttttcgcatttgccgcagccggtacaggcgtcgctgtgtacggtgggcagaaagcgcgcatgtttgccggtgcgcatgttgcgatccagctccagcgtgatggcctcatcgattttcgggcattcgcggtaacaaacgtcgcagcgcagcccctgaaagttgaggcagttttcctgatccagcagcaccgccagccccatgcgcgagtcatcaatggaggcgatatctttattcagcgccccgctggggcagactttggcgcacggaatgtcttcacacatttcgcaggggatgtcgcgagcgacgaaatagggcgtgcctgccgatagcccggaggccagcgtcgccagttttagcgtgtcgtatggacacgcctgaacgcactgcccgcagcgcacacaggcgctggcgaagacattttcattcagcgcgccaggcggacgcagccgcacgcccgatgcgcgcgcggtttgctgttgcaagcccagcgccacgccaaccgccgccagcccgcccgcagtgcgcacaacatcacgcaggaagcggcggcggccattttggggtttcgctgtacgggacataacgcgttacaccttcgccagcttaacggcgcacttcttgaagtccgtctctttagagagcgggtccgtcgcatccagcgtcaggttgttcactagctgagcggcatcgaagaacggcatatacaccagtccctgcggcggacggttacgtccacgcgtttcgacaatcgaaatcacttcaccgcggcgggacgacactttaaccttatccccgcgacgcagatcgcgcgctttcgcatccagtgggtgaataaagaccaccgcttccgggaaggcgcgatgcaattcaggcacgcggcgcgtcatactgccggtatgccagtgttccagcacgcgaccggtggaaagccacagatcgtactcgttgtccggcgactccgccgcgggttcaaatggcagcgcgaagatcaccgctttgccatccggtttaccgtagaatttgtacccttcccccgcttttacatacgggtcgttgccttcgctgtaacgccattgcgtctctttgccttcgacgaccggccagcgcagaccgcgcgcgttgtggtaatcgtcgaacggcgccagatcgtgcccgtggccacgtccaaaccaggcgtattcttcaaacagccctttttgcagatagaagcccagctcacgagactcatcgtttaactgatcctctttcagctcgctcagcgggaatttgctgaccgccggcgtggcgaacagaacgtcatacagcgttttgccgcgcagctccggcttctgagccaacaacgcctccggccagacctcctcggttttaaaacgacgggagaactgcaccagttgccagaggtcggatttagcttcgcccggcgctttaatttgctgacgccagaactgcgtgcggcgttcggcgttgccgtaagcgccttctttctcaacccacatggcggtcggcaggatcagatccgcagacagcgcgctcaccgtcgggtaaggatcggaaacaatgataaagttacgcggatcgcgccagcccggcatccgatcttcattgatgttcggcccggcctgcatattgttattacacattacccagtagacgttcagcttgccgtctttcaacgcgcgatcctgcgccaccgcgtgtaaacccacttttgccggaatagtgccagcggggatctgccagtgtttttcgcagatatcacggtgtttttcgttcgtcacgaccatgtctgcgggtagacggtgtgagaaggttcccacttcacgcgccgtaccgcaggcggaaggctggcctgtcagcgagaaaggaccgcagccaggctgggagatttttccggtcagcagatggaggttgtaaaccaggttattcgcccacacgccgcgggtatgctggttaaaacccatcgtccagtaagagatcacgcgcttattcggatcggcgtagagctgtgccaactgttccagttgatcttttggcacgccggtcatttcagcggtcttgtccagcgtatattctgccacgaaggctttatactcgtcgaagctcatcggctcggaagcgtcggagcccggattcttcgccgctttttccagcgggtgcgtcgggcgtaagccgtagccgatatccgtcgcccctttacgcaggttcacatgctttgtgaagaaatcctgatttaccgcgttgttctgaataatgtaattcgcgatatagttaaggatcaccagatcgctttgcggggtaaagacaataccgttgtccgccagttcaaagctgcggtgctggaaggtggagaggacggcaaccttcacgttcgggtcggacaaacggcggttagtgatgcgcgaccataaaatcgggtgcatctccgccatgttggaaccccacagcacaaacgcatcggcctgctcaatatcgtcgtagcagcccatcggttcatccatgccaaaggtgcgcataaagcccaccaccgccgaggccatgcagtgacgcgcgttcgggtcgatgttgttagagcggaaaccagccttgaacagtttcgcggcggcatagccttcccagatggtccattgacccgatccaaacatgccgatcgcttctggtcctttctctttcagggaggttttaaacttctcctccatcacatcgaaggcctgttcccagctcaccggcgtaaactcgccgtctttgtgatagctgccgtctttcatgcgcagcatcggctgcgtcagacgatctttaccgtacatgattttgggcaggaagtagcctttaatgcagttcagaccacggttgaccggcgcgtcggggtcgccctggcaggcgaccacacggccctgctgcgttcccaccaacacaccgcaacccgttccgcaaaaacggcacggcgctttatcccatttgatggcttcctgctgcccgacaacggcgcgggcgacgcccggcacgctcagaccggcagccgccgcagcggccgcaacggcgttagctttcataaagctacgacgactgagtttcatggtgtttcctcaccttgctcatcctgctggtgataaaccagcgacaccgccagtacgccctcgacattgcgtactgactcaattgtttgcatcagcgtttcactctgatctgcttccgccaccacgatcagttgcccgctttcaacgtcgcttaacgcgacttcgcaacccggcaacgtgttcaactgtgtgccaatggcggcgatgttctgacttttggcctgcacgaccaggctacagacctgccagttagtgcgcatggtggttctccgctttgatggctgacacgggacagatagccacacacgccccgcatccgttacaggcctgcgagtcaagctgcggctggtaaatgccggatagcgtgggacgaaaggtaatggccataggttcacaactgtcctggcagcgatggcattcaaccgattgcctggcgaggcagttttccgtgagcgtaaaaatcagatcccaggccctggtgtggcgcggaagaaaaagcgattcagtacaggcctgcgcacaggcataacaaaagctgcactcgccccgtttgaaatctacgctcggatatccccccgcccctcgctgcaggatgtcggcctcacacgcctggatgcaggcgtcgcaacgcagacaatgtgcgagaaaataggttgtttctctggcccacggcggaagaatcccattgctggcgttgcgccaactgccggtcaacatgcttcgacgggataaatcaaccatgatatcgcccttccataacgacacgcttccatagggagtgaataccaataaaaaccgtacaatttatgagtagttgtttttgtaaataagatatttcaggatgtgtaagagatgcataccccgatagaggtaaatgctgttgccggatcaaaagagtgccaggtaaagacccgtaaacgtgctttttctcacatttcaatgagttatatagatgcttatataacgaaaatcactaatagttgataatttcatttacattatcaatatcggaatattccactatataaaaagacgctattttattaataatcttgaaaatatgagtaaatacagattaatagataatatgaatgtgttaatctgttgcccgtgcataccgaaaacagcagaaaggaaataccgtgaacaatcaaatgaagatgtttgtccctgccgttgtcttcgccgccctcgccagcgcctctgcctgggctaacaatggtgataccgcccagccgctggaaaaaatcgccccctatccgcaggcggaaaaaggaatgaagcggcaagtgataacccttacccctcagcaggatgaatctaccctcaaagtggaactgttgattggtcaaacgctgaatgtggattgtaaccagcatcgcctcggcggcacgctggaaacaaaaacgctggaaggctggggctatgactattatgtctttgataacgtcacctctccggtatcaaccatgatggcctgccctgaaggtaagaaagagcaaaaattcgtcaccgcctggctgggtgaagacgggatgctgcgctacaacagcaagctgccgatcgtggtgtataccccggcgaatgtggacgtgaaataccgcatctggaaagcggacgctaacgtacagaacgccgtcgcgcgataacgttacgctgcccggtcacacttaccgggcatctgaacacgccggctcacgcagcgctccggggttcttttcaaaacacgtctggaaatccgctcgcccgatgcctggtggcgacgcgtggcatcttatcaggcctacccgcgtgcggacgtagggctgccatcaggcggttcatccggccattacgcagtacgcgcaaccgcatcacgcgaggcggcatcacgttcgtcgccggtgagttcggttagctgtccgttgcgcatttcaagcagacgatcggcgtgaataaaatagtgatcatcatggctgatggcgaaaatggttttgcccatttcctgcattaacggcaacagcacctgataaaactcccggcggaaatgcgggtcctgatcggcggcccactcatccagcaaaataatatcgcgctcttccgccagcgccagcagcagcgcaatgcgctttttttgccctttcgacagtttaagattcaaaatgcgcccgtcgtttagctccagcttgtgcgtcattttcaggtgctcaagccacttttcgaccagcgcgggattggcgggtttcccctgcggccccagcaggcggtcgaataaccacacatcggtgaacaccgcagaaaacagtttgcgataatcttccggctgcccggcggcaataggttgaccgtcaagtaaaatcgttcccgattgcggctggtataaaccggtcaataacatggccagcgtcgatttcccgctaccgttgccgccaattaaaaacagcagttcgccgcggtgaatcgtcaggttgatgggccccacggaaaacgcgttatcctgatagtggaaaaccacgttgcgcagctccagcgtcttccagtcgggaaaggctttcggctgtggaaaatcaggcttatacggggcgagcgcgaatttattcagtttattaaacgccacctgggcggtcagtagggttggcaacgcccccaccgcagacagcagcggcgtgcgcaggaacagcaacgtcagtgaataggtcgccgcgacgttggtatccgcccagccgagactattcgccatccagaagaccaggcctatcgcccccagcatcatgatattcgaccagttgacggcgctcagatgaaaagtatcggcacggataatgtgatgacggtactctttggcgtccggggtatagcattgctgaaaaatctgctccgcacgctcgcggtttagcgtcagctctttgcgtccttccagcaccgtctgatagtcgttgtacagcttatcttcggtctcgcgcagggtcgccatatgctggtaaacccgcgccaccagcacgaatccgccccagatagtgaccgccatccagatagccgtaaccagcagcatttttgtcgatagcatcgccagatacgccgccgagccgacggtgaggataatgccctgcaccagctcaggcagacgcacaaaggcgatagtaatattgcgaatatcgctggtcagaccggccagtaaagaggcgctgcccagttgctcaatgcgttcaacgtgcgtatccagaatgcgcttgataaattcgctgcgcaggcggtaaacgaaatggtgtcccagagtggtgagcgccagttgggaacctaatgtgacgaccattagcaacaggagcaggccgagaaattccggcagcaccatgacgttggtgtccaccgtttcaatcaggcgctgattgataaacgcgatcaggccaatccccagcgccgcgctggcgaggctcagcgccatcacgctaataaatggccagcggtactgccgccagacaagaataagaagttccatgcttacaacccggaccgataataacagcccgcagtttaactaactccacctgcacagcaaataattcttatttttattctttttcagccgcctgacggaaggtgagattgtaacgaaattcaccggtcatgggatgaaagcccgctttaagcggctggataccatgataaaacagacgggactcgccgccccagaccacgatatcgccatgctccagtaagatccgctggagcggatcgctgcgacgcaggccgccaaactgaaaaaccgccggcacccccaacgaaactgagacaataggcgcgcgcagatccggctcgtctttatcctgatgcagcgacagttttgcgccgggcgcgtagcgattgatcaggcaggcgtccggttggaagctcgcataccctgccgcgattgccgcctgacgacatacgctggcaaacgataacggcagcgcaggccagggtttatcggtcaacggatcgcgcacggcataacaataaccgtgacgatcggtggtccaccctaacgcgctgcagttggtcatcgccaccgacatggtgtagccgcccggcgtcaccatctgacgaaacggagactgactggcgacaaacccgatatcgtctaatagcgactgcgccgcgcgaaacgcaaagcggcgcaacaccaccgcgccaggcgccaggggctcttgccagggcgcttcatcagcaaatagatccagcattgctactcctctttttgcgcttctcgctttaatagctgcgcttttcgacgcacgccccaacgataaccggagagcgcgccatcgcgacgcacgacccgatgacacgggatcaccatcgccagtttattcgcgccgcacgcgctggcgaccgcgcgtaccgccgtgggtttgccgatagtcgcggcaagctgttgatagcttacggtttcgccgcagggaattgcgcataacgcctgccagacctgctgttgaaacgcggttccctggatatccagcggcaacgagagcagcacatcgcgtgtgttgatagccgcgacaacctgccgcacccgttgctgaaaagacgcgtcggcaggttcgtggcgggccgtcgggaaaagggtgtgtaattcagccagtagcgcgtcgtcgctatcaccggggagaatcgcgcaaatcccccgctcgctctccgccaccaggcaccgtccgtaaacccagtccgtcagcgcatagcgaacggagacattatcgccgcctttgcgaaactgttttgccgtcatgcccagcgtctggtcggcatgacggtagtagctactgctatccgggaagccagcgcgataaatagccgccgtgatcggctctcctttcgccaacgcctcacgcagccgccgggcgcgccacgcctgctgccaccctttcggcgtcattccggtgctcactttaaacagacggtgcagatgaaacgggctcatcgccaccgcctgcgccagagacgccagcgttaccggcgtctcctgctcaagtaaacggcaggcgcaggcaatcttatccaaccgccgttgctgcgcgcgcgcattatccggctgacagcgcttgcaggggcgaaaaccggcgtccagcgcctgctccgcgttggcaaaaaagcgaacatttttacgtaacgcccgcttcgagcgacaagaagggcggcaaaaaacgccagtggttcgcactgcaaaaacgaaacgcccatccgcgctggcatcgcgcgcctgcacccgcagccagcattcatcatcggtaagtaacgcttttttcatcatagactccttcattaagcatagtgcttgcttacatgcagtgtgtccgtaaatccgcccacaaaaacccgtaatcttgcgttttaattcttatcgctcaccaggaacgttttgaactgcggcgacatccaggttttaaagccttcaccttctttcatgatcataaagaccgccagcccttcccgccgcacgacctcttgcgccttttgcgtaccgagcaccatcaggccggtgtcccagccgtccgcttccagcgccgttggcgcgatgaccgtaaccgataccagattgtgttcaatggggcgccccgtttgtggatcgataacgtgcgatacgcgcttgccatccagctcgtaatagttacggtagctgccggaggtgctgatgccatgcccgttgatatccacaatcgcctgcaccgcgttttcccggtcggtcggcttctgaatcgcgacgcgccacggctgcccctgcgcattcatcccgcgactgcttaatgcgccgcccaccgagaccagataacgcgcaatgccctcctgctccatcagtcgcgccagatgatccgccgcatagccctccccgaccgtggagagatcaacataaagatccggcagatctttttgcaaaaactgatgtccagccctgtcgataacctgcaaatgttgcaggcctgttttcgcttttgccgcatcgatttgtgctggtgttgggatatgcagcggctgccgatccggcccaaacccccacagattgaccagcgggcccacggtgatatccatcgcgccatccgtcttcgcgccaatacgtagcgccgaggtcacgatatccgccatggcttcgctgaccggccagggcgcaaggctgcgtgaatggttaaaacgcattagcgcggagtcatttttataggtagaaagcaaccaatcatcagcatcaagctgagtctggattttagtctgtaactctgcggcgcgtttcgcatcgatgccaaccacgctcacccgccagagggtccccatcgttttaccttccagcacctgagcggcaggtgacgctgttgtcgtttcgggagcctcatcgcagcccataagtaaaaaagccgccgccagacacacggcccggcaaaaagtcattttcatcgctgtttatcctcattcgaatggacgcaagcgtatatcaaaacgtcgtatttgtacgccggaataaggcatgaaaaaagggcccgcaggccctttagcaacatcttttgctgattagaactggtaaaccagacccagcgctacgatgtcgtcggtgttgatgcccgcatcgcgggtaaagtcgtttttatccagcaggttgattttgtaatcaacataggtggacatgtttttgttgaagtagtaagtcgcgccgacatcaacatattttacgatgtcctggtcgccatagctggcgccgtagccgttgctgatgtccttacctttagactgcaggtaagccacagacggacgcagaccaaagtcgaactggtactgagcaaccacttcaaagttctgcgctttgttggcaaaaccgtaagaggtggacttattgttgccgttagaggtaccaaaacgggttgcgttataggtctgagaatactgcgctgccagatagatgttgttcgcatcgtatttcaggccgccggtgtagaccgtagcgcgatcgccgttaccatacaggtgttcgtcagcggtgttgttctgatcggcagtacgtttagacgtggtgatagcgccaccgacagagaagccttcgccgattgcataagtcagcgatccgccgtaaccgtcaccgttctggttcagcaggctgcgaccgttggtgttttcaccgctcacgctgccatttttgccctgatactgcaacgcgaagtccaggccatccaccaggccgaagaagtcggtgttacggtaagtggcatagccgttaccacgctgctgcataaagttgtcagcgccgtaggtgtcgccgccgaactccggcagaacatcggtccaggaggtcacatcataggttacgccgtagttacgaccataatcgaaggaacctgcgtcagcgaatttcagacccgcaaacgccacacgcgtccaggagtcgttgctgccttcagtctggttgccctgaatctgatattcccactggccataaccggtcagctgatcgttaacctgcgtttcgcctttgaagccgatacgcatgtaggtctggtcgccgtcgctgcctttgtcgtcagagaagtagtgcaggccatcaactttaccaaacaggtctaatttgttgccgtctttattataaatttcagccgcattcgctgcgcccgccaccagcagagctggtaccaggagggacagtactttaactttcatgttattaaccctctgttatatgcctttattgcttttttatgccactgcttactggttaaccctcattaaccagtcggcaagtccattctccgcaaaaatacagaataatccaacacgaatatgatactaaaacttttaagatgttacagttatctacatagatgtttcaaaatatgaattttacggaacttttttaaagcaaaaatcaagtaaaaataagcacaaatagacaaaatatattcacgagacttttaaaatcaatgggttaaattgatgaaattcatagcactgaatgataaaacagaatcttcattcgcaactaaaatagtgaccgctatcatcattaactttatttattaccgtcattcacttctgaatgtctgtttacccctatttcaaccggatgcttcgcattcggtttttttacgttttttcagacacacccggcagatttatgctactgcctaaaactatcacggttattcactaccctcccctgctcgaccgttcgtaagacattagcaaataatttcttgatatttagtgctaaacatttataagtagtctttatatttgtaccgttctgcgaaggttgtacgcttttcccgtcccgccgacggagcgcgtgttaagttgcccggcatgacgtaagagtctggaaattcattcattaccctttatactgcccttcaccttcagcgttgcttttacaggtcgtaaacataaatgagtcagtctgacacaacggtctctacccgattctcccttctaccgggaagcattacccgtttcttcttattgctgatcattgtgctgctggtaacgatgggcgttatggtacagagcgccgtcaacgcctggttgaaagacaaaagctatcaaattgtcgatatcactcacgctattcataaacgcgtggacacctggcggtatgttacctggcaaatttatgacaacatcgccgccaccactacgccatcgacaggtgaaggacttcaggaaacgcgtctgaaacaggatgtgtattatcttgaaaagccgcgacgtaaaactgaagcgctgattttcggttcccatgacagcgccacgctggaaatgacgcagcgtatgtcaacctatctggatacgctgtggggcgcggaaaacgtgccgtggtcaatgtattatctcaacggacaggataacagcctgattcttatctctaccctaccgttgaaagatctctcttccggctttaaagagtccactattggcaatatcgtcgattcccgccgggcagagatgttgcagcaggcgaatgcgctggatgagcgcgaaagtttctcctcattgcgaaaactggcctggcaaaacggtcactattttacgctgcgcacgaccttcaatcagccaggacatctggcgaccgtggtggcgtttgatctgcccattaatgatttaatcccgccgggaatgccgctggacagttttcggatagagcctgacgcaacccaggcgacggggcgaagcagtgaaaaggaagcgccagatagcgtcacgattagctttaacggttcaaaaattgagatctcctcagcgcttaactctaccggaatgcgcctgatctggcaggtaccgttcggtacgcttttgcttgatacgttgcaaaatattctgctgcctttactgctgaacatcgggctgctggcgttggcgttatttggctacgccacgttccgtcatcagccgggacggtcgacggaatcgacatccggcaacgcggcgaataacgagcttcgcgtcttacgcgccattaatgaagagatcgtttctctgctgccgctgggtctgctggtctacgatcaggaaggcaaccgcaccgtgatcagcaataaaatcgccgatcatctgttgccgcatcttaacctgcaaaatattaccagcatggcggaacagcatcagggcgtgattcaggcgacaattaataacgaactgtatgagatccgtctgtttcgcagccagatcgctccccgcacgcagatctttattattcgcgatcaggaccgggaagtgctggtgaataagaagcttaaacaggcgcagcgtttgtatgagaagaatcagcagggtcgcgccgcctttatgcaaaatatcagcaacacgcttaaagagcccgtacgccaactggcggttaacgccgcggcagtcaccacgccggaaagcctgaaactggcggatcaggcggatgtattggtacgtatgatcgatgaaatccaactggcgaatatgctggaaaatgacgcatggaagagcgaagccacgctgttctccctgcaggatcttattgacgaagtcgtgccggaagtgctgcccgccattaagcgtaaagggctgcaactgctgattaataaccatcttagcggcaacgatgaacgctggggcgatcgcgacgccctgcgtcggattttgctgctgttgattcagtatgccgtcacaacgaccgctatgggtaaaattacgcttgaagtcgagcaggatgaatctatcgcggagcgtctgactttccgtattctggatacgggcgaaggcgtaacgttaaacgagattgataatctgcatttcccgtatatgaatgaaacgcagggcgatcgttacggcaaagcgaatccgctcaccttctggctgtgcaatcaactggcgcgcaaactgggcggtcatctcaacattaaagcgcgagaaacgctgggcacgcgctataccgttcatgtcaaaatgcttcctcacgatcagcatactcaggtcgaagagcgcctgctggacgacgtgagcgtgatggtcgatgtgacgtccaacgaggttcgcgcgattgtgctgcgtcagttagaaaactggggcgccacctgcatcacgccggatgaaaggcagataagtcaagaatatgatctctttttaacggataatccgtctaatcttactgcctcgggcttgcttttaagcgatgatgagtcaggcgtgcggaaaattggcccgggtcagttgcgcgtcaactttaatatgagcaatgctatgcaggaagctgtactacaacttatcgaagagcagctggcgcaggaagagattcccgcctccccgctcggcggagatgaaaatgccgagcttcatgccagcggctattatgcgctatttgtagacacagtaccggatgatgttaagaggttgtatactgaggcggcaaccagcgatttcgctgcgctggcccaaacggcccaccgcctgaaaggggtgtttgccatgcttaatctggtacccggcaagcagttatgtgaaacgctggaacatctgattcgtgagaaagatgctccaggtatagaaaaatatatcagcgacattgacgcctacgtcaaaagcttgctgtagcaaggtagcccaatacatgaacaatatgaacgtaattattgccgatgaccacccgattgtactgttcggtattcgcaaatcacttgaacaaatcgagtgggtgaatgttgtcggcgaatttgaagattccacagcattgatcaacaacctgccgaaattagatgcgcatgtgttgatcactgacctctccatgccgggagataaatacggcgatgggatcaccttgatcaagtacatcaagcgtcattttccgagcctgtctattatcgttctgaccatgaacaacaatccggcgatcctgagcgccgtgttggatcttgatattgaagggatcgtactcaagcagggtgcgccaaccgatctgcctaaggcgctggccgcgctgcaaaaaggcaaaaaattcaccccggaaagcgtttctcgtctgctggagaaaatcagcgcaggcggttacggcgataagcgcctgtcgccaaaagagagcgaagtattacgcctgttcgccgagggtttcctggtcaccgaaatcgccaagaagctcaaccgcagcattaagaccatcagcagccagaagaaatcggcgatgatgaaactgggcgtagagaatgatatcgcgctgctcaactatctctcttccgtcaccctgagtccgacagacaaagaataaatcacttttacgttacccagcctgatggcgctacgcttatcaggcctaccagtcgactcatcttttgcaggccggacaggcgacgccgccatccggcattttttatgcccgcgttttacgtacccgctcggcatacaccgccagcgtctgtttcaacacatccagcgtcacaggcttcgacaaacaactgtccataccggactccaggcaacgttgtttctcttccgccagcgcgttcgccgtcacgccgacgaccggcagcgtcagcccaagctgacggatacgctgcgtcaggcgatagccgtccatgttcggcatgttcacatcgctcagaacaatatcgatagcatttttactcagcacattcagagcgtccacgccatcattggctgtcttacactgataccccagcgatcccagttgatcggccagcaagcggcgattgatcggatgatcgtcaacgaccagaatcatcatgtcgtcatttgaatctgcggttttatccgtcgtcggcaatgcgctggaaagcgcttcactatccagctcaatactatagatacgcgccaacagcgcgggcaactcatgcaccgacgccacactatgcacccactcgcccggcgctctttccaacggaatcccgatatgacggcggcaaaagacgaccgcagccctcccctgccaggtatgctccagcgcgtcatcgacaatcaaaatatcgtccgcggcgggttcttgcccttcataacgctgcgtatgaacgccgctacgcgccagactggtctcaataaactggcacaaagaagtattgcgcaccgccagccaacagcaggttccggcgagtccttccacgctctttttcacagggtattgcgcgccataaagcgggatgcgcagcgtaaactggctccccatgcccggctccgaatcgacggaaatatcgccgtccatcatgctgatcaatttttcgcaaatcgccagccccagaccggtcccctgaaagttacgctgtacgccggttcccacctggaagaagggatcgaacaggcgaaccacctcttttgccggaataccgacgccggtatcccgcacgcgaatgctgagataatccccatcacagcgcacatgcagcacgatgcagccaatatcggtaaacttaatggcgttgctcaacaggtttgaaataacctgctgtaaacgcatcgggtcaccgttcagcgataccggcacgtcaggctcaataaaacaatacaggccgagctgcttacgcaccaccagcggcagataattggcggtgatatggttcatcacctctcgcggtgaaaattcgcgcggctcaatctttagctgttccgactcaattttcgagaagtcgagaatgtcgctgataattttcagcaacagactggaggagttattcatcgccgtgaccagccgatccacgccttttggcagctctttggtttgcagcagatcgagattgccaatgataccgtacagcggtgtgcgcaattcatggctgaccgtcgcaaggaacatggatttagactggcttgcctgctccgccgcctgcgccatctcttgcagcgactcttccattttgacgcgcgtactcacatctaccaacacgcaaatcgcgacgttttcattgcgatagcgggaatggacgaagctaatttgcaaattggtattattgctggtcaatacatcaacgaagttaacctgctggccgcaaatgatttgcgtcaggcgctgtctatcttcatgcgtgagcatgttcaggtaggtgtgcgccagttcgttactcagaatattgacaccatcaatagtgcgcaaaatacagatccccaccggcgcggaggcgacgattttacggttgaactgttcatgctcttccagacgctgggcatcgctctccgccggaatgaaaattcgccgctcatacatccgcgcaagcgtaaacagccctgcgcccaccagcacgttcagcaggatagcgttcaggataagaatacgaatacgctccaggactaaatctacaggcacagaatagacaatactgagcgaggatggcggcaggctttttttgagtaccagttcgcgaaaacctggcgtataaccaaaccaggagcgctcctgcatccagcgcggctccgctttaatattgccgtcaggaccggtcaacgaaatcagcgaatggccgttctcatcaataatagtgacgcccatcggcaaactgccgggcgtgaaaaaattttccatacggatggactgctcgacgcccagcagcgcctgcagacggttggccagatacaccggcgtcagcgcataaaagtagcccacgccctgacgcgcgccctggcttatccagaaaaggttattcccactttcttcctgcggcgcgttgcggtatttcataatccgctcatgtaacgcttttaacgcatcatcgcgctccacgggcatttcacgcaggccgaaattcgccatacagaggttatcgctgccaatcaggaaaacgcggttaagatcatacgccgctgaaaagttgtcgcgccagtaacgcataaaccaggccagcgactccagcgatccgcgccaggcggagcccatcgccgcacagtctgagtcggcaaatagcggttcaaagtccggcaccaccattttgtcatcacgcgcacgcgacgacatgacgccgttttccgccgttaaacggttctcggcgatatatttgagctctttcatcacatccgacgtgcgctggataaaacgctgcgcctgatcggagctaaggttgaactcctgacgaatttcagattcccgctggtgcagggcattgacgatgtaaaacaccgaaacaaaggcgattaagagccaaatgagtaacgctaacgctctgaataagtagcgcgagactttcagcgtagttcgaaaggaagcaaggtatttcaaaggggcgaagctccgcctcaggatgtaaatagagtgtgactaaggtagcggtaaatgacgtagcccgcaacggcaaagaaaaagggccggatatccggccctcgcacagcaataacattactcgtcagcgtcatccgcaacgtcgtcatcgctttccgcttccggggcgatatcctcatccccttccgccacgctgccgtcgatagcgtcgagttcttcgtcatctaccggttcagcaacgcgttgcagacccaccacgttttcatcttccgccgtgcggataaggataacgccctgggtattacgtcccacgacgctgatctcggacactcgggtacgcaccagagtaccggcatccgtgatcatcatgatctggtcgcaatcgtctacctgtaccgcaccgacaacggaaccgttgcgctcggtcactttgatagagataacgccctgcgtcgcacgagacttggtcgggtactcgtccgctgcggtacgcttcccgtagccgttttgcgttacggtcagaatagcgccttcgccgcgtgggatgatcagagagacgactttatcgtctcccgccagcttaataccgcgcacaccggtcgcggtacgccccatcgcacggacggcgtcttctttgaagcgcaccactttacccgcggccgagaacagcatgacttcgtcagaaccagaagtcaggtcaacgccaatcagctcgtcgccgtcgttgaggttcaccgcgataataccggcggaacgcggacggctgaattcggtcagcgccgttttcttcacggtaccgctggcggtcgccataaagacgttgacgccttcttcgtattcacgaaccggcagaatcgcggtgatacgttcgttggcttccagcggcagcaggttaacgatcggacgaccgcgcgcgccgcggctggcttccggcaactgatagaccttcatccagtacagacggccccggctggagaagcagaggatggtgtcatgggtgttggccaccagcaggcggtcgataaagtcttcttctttaatacgcgcggcagatttacctttcccaccacgacgttgcgcttcgtaatccgtcagcggttgatatttgacgtaaccctggtgagacagcgtcacgacaacatcttcctggctaatcagatcttcgatattaatatcggcgctgttggcggtgatttcggtacgacgctcatcgccgaactgatcgcgaattaactccatctcttcgcggatcacttccatcaggcgatcggcgctgcccagaatgtgcagcagttcagcaatctgctccagcaactctttgtattcgtcgagcagtttttcatgctccaggccggtcagtttctgcaaacgcagatccagaatcgcctgcgcctgctgctcagtcaggtaatactgaccgtcacgcacgccaaattctggctccagccattccggacgcgcagcgtcatcaccagcgcgctccagcatcgcagcaacgttgcccagatcccacggacgcgaaatcagcgccgcttttgcttctgccggcgttggcgcgcggcgaatcagttcgataatcgggtcgatgttagccagcgcaatcgccagagcttcaaggatatgcgcgcggtcacgggctttacgcagttcaaaaatagtacgacgcgtcaccacttcacggcggtggcgcacgaacgctgaaatgatgtctttcaggttcatgatcttcggctggccgtgatgcagcgccaccatgttaataccgaaggaaacctgtagctgggtctgggagtagagattattaagcaccacctcgcccaccgcatcgcgtttcacttcaatcacgatgcgcatcccgtctttgtcggattcgtcacgcagcgcgctgatgccttccacgcgtttatctttcaccagctcggcgattttctcgatcaggcgcgctttgttcacctgatagggaatttcatggacgatgatggtttcacggcccgttttcgcgtcagcttcaacttccgcgcgggcgcgaatgtacactttgccacgaccggtacggtaggcttcttcgataccacgacgaccgttgatgatcgcggcggtcgggaagtccggccccggaatatgttccatcagcccttcaatgctgatgtcttcgttgtcgatatacgccaggcagccgttaatcacttccgtcaggttgtgcggcgggatattcgtcgccatacctactgcgataccggaagaaccgttcaccagcagattcggaattttggtcggcatgacgtccggaattttttccgtaccgtcatagttatccacgaaatccaccgtctctttttcgagatcggccatcagttcgtgggcgattttcgccagacggatctccgtataacgcattgccgccgcggagtcgccgtcaatagaaccgaagttaccctgaccatccaccagcatgtaacgcagcgagaatggctgcgccatacgaacgatggtgtcatacactgcggaatcgccgtggggatggtatttaccgattacgtcaccaacgacacgggcagattttttataggctttgttccagtcattgcccaatacgttcatggcgtaaagtacgcgacggtgtaccggcttcaggccatctcggacatccggcagcgcacggccaacaatgaccgacatcgcataatccagataggagcttttcagctcttcctcaatgttgaccggtgtaatttctctcgcaaggtcgctcatctaaccgctatccctctactgtatcccggattcaaaggtcgcaaattataacacattcgcccacgtactggtaaacggaatgcagccagacaatgctttattcgggtgccgcatgctctcttcatttataagcgtggtctcggcgtttatcggcgatcggtttcagaggcgacacaggggagatcggggtctggccaggaagaggctggaaaatcaatacctcccgcgtatacccgtcatacttcaagtttcatgtgcgttggcggcaagttactcggcccatccctgggcctcgccccgtcggggttagcgcaagcgctgttcaagacggttaaccattttatcctgcaactcgaattatttaggggatatgccgggaggcataaaccataatcagtatcaccagatgctatttaatcacataggccaggtattctttcactacctcatcgtttaattcctgacccaatccgggctgttccggcgcgacataatagccattttccggttgataatcgtgggtacaaagttcccgaatagatgctttcatcgcattggtatgatgctcatgaataataaagttgggaattgctgtttccatatgcagcgcggctaccgtggaaacaggaccgccgcaaacatgcacctgtacagtggtgtcataaatattagcatagtcacagattttctttccttcggtaattccgccgcagagacacaaatcaggttgcgctacggcaatagactgcttctccagtaattccctgtatccccatcttgtgtaggaacgctcgccagtggcgattggaatcgttgttgaacgggaaactttctgcatattatcagaatttaatggatgaatcggttcttcataaagaaagatacgatacttttctatcgccttcgcaaattgaatagctgagtttgtaccgagaagagaatggatttccacgataatatcagcatcatcccccattgcttcacgcatagcggcaattcgcgcttcccccatttttaattgatcggccagtaacaatcctgaatagttacgatttttattctgaaaaacacagtcatcgccattacgatcgatttcgagtggatccactttaatcgcatcatatccatcgtcaagagccgcacgcgccgcctcagcatattcctcaggtgtcactaatatctggcgtttatccccccaaccaaattgtaactgactagcataggttcttaatttttcattagttttcccgccaaggagctgataaacaggtacacctaaatatttacctttgatatcccaaagagcaatatcaatagcgctcattccggcataaaaaacgtttccgccccccatcccccaaaaagtctttctgaaaaagaactcccaaattttttcgatatttaatggatcttcacccacaaccaatggcgccagatctctgatgatccctacgccagctttagcgcctgcgccataggccagtcctacttcgccaataccacttaatcctgagtcggtattcacccggataagtactggattataggatgacatcgtttgatctcttttttttaattcacagtcaaaaacttcaatagatgtaattttcataatttctccatttatcaggttcgtgatacaacatttgtttgttggcttttttcttttttcacatcaattttcattaacgccaaaacggctaccgcagcgaagcaaagtattgcctctacaataaatattcctgtcgcaccataatgagtagaaacaaatcccagtgacttattaatcaggaatccgccaagacttgaacatgagttaataaacgcaatgctgatagccaaccctgacggcgacaataatgcagaaggcagcgcccagtaaggtccgtaatagctgaggatcccaacaccatagaacgttagccccagcattctcagcgacattgaggggacaagagcaatcatcagaaaaccacagcctgccagaaacatgggtaatgcagcatgccattttcgttcattctttttatcggaatgccagccccaccagggcatgctgaacatagcgaaaataaacggaatactcatgattaaaccaacgtcagtatccgtaaaatcagctgaaaatcccttcaccaaccccggcaaccagtagtttgccgccagagcagccgcctgaatcaacatgtaggcgaaagaaagctgaagcaaaactggatttttgattacggaaagaaaggatgagttggtatttttatttaatgcagctgcggtttcattgtcagtacgtaatttattaactaaggccgatatctgctgtggcgtaagccatttagccttttctggactgtcaggcagtaaataaaatgtcaggatgccaaggaatacggtagggataccttcaatagcaaaaagccagcgccagccttcataatccggggtattcaaatgctcgatgatccaaccagacatcggtgcagccaataccgatgcaacagcaatagataacatgaagaaactattgacttttccgcgttcacgagccgggaaccaacatgcaagataataaaccatgcccgggaaaaagccagcttcaaatacccccaaaaaaatgcgagccagcaaaatatgttgagtatctttagcaaaaaaaatcagccctgttaccgctccccagccgataataatggaactaatccattttcttgcgccaagcttttgcaagccaatgctactcggaatttgaaagattaaatatgatatgaagaatacagaagaaatattagcgaaatcctcaggcgtaataccgagagattcattcatgcgtaatgcagcaaacccaatattgacacgatccatatagttaaaaaagtaaagaataaaggccaaaggaatgattttcctttttacaatacgaattgcatcgtataaattttcttgtggactactcattttgcatcaccttttatgattcaatgaataagggtattgaccggaattgatgttacgtaaaaaacaatacaattcaaaagctaatgtgtcatatctgatatatcagcaagcaaacttaatgaaatatacaataacaacaataaagtatgtaaattttcttatatctgatatattagatccgttaattttgaataaattaattacaatggagccgggtttaaccatggaggagaagaaaatgaaaaatagattaaagcgtgactttagtcacatatcaattgaaatacccaaatccatcacccaggtgattaaagagaaaataagggagatgattatccatggcgatttcgatcttgggcaagcgatcagtgaaaatgaactatcaaatattctgatggtaagtaaaacaccaattcgtgaagcttttatttggctgagctataatgaaaacttagtcaacatcattccccgcagtgggacatttgttttttctgtcaccgacgaggatatcaatgatctcatcaaaatgagggttatccttgaacagggcgcaattcgtgaagcgatggagaaaaatgctaacaatgtcatagtcgaattaagcaatattttatcgaagtcagcaaaaattaatgcagagcgcgatacgcaagcttacctcaaactggatcatgattttcattatgtttttgtgaaatatgccgataataaatacatttcacaagcacacctgttgatctcagcacgtttattggcaattcgctacagactggattttaccactgaatatatcaccagctctaaccgtggacatgccactattttggatatgttaaaaaacaacaacgtcgagggcgtctgtaattttatcacgcaccacatcggtagcggttttacagaacgcgcaagaaaacttcttgcgctgaaagcgtaataaagacggcagtagatataacgcagcgactttgcacctgctatactgccccgatagatcaatagcggaatctcatgtactcatgaacactgaaaaaccgtcggtagctcacaacgttgaccataatgaaatcgccaaattcgaagccgtcgcgtcgcgctggtgggatctggagggcgaattcaagccattgcatcgtatcaaccccctacgccttggctacattactgagcgctcaggcggcctgtttggtaaaaaggtgctcgacgtcggctgtggcggcggtattctggcggagagcatggcgcgcgaaggcgcaaccgtcaccgggctggatatgggctttgagcctttgcaggtcgccaaactgcatgcgctggaaagcggcatcgaggtagagtacatgcaggagacggttgaggaacatgcggcaaaacacgcccagcaatacgacgtcgtcacctgtatggaaatgctggagcacgttcccgatccgcaatcggtcgtccacgcctgcgcccaactggttaaacccggcggcgaggtgttcttctcaacgttgaaccgcaatgggaaatcctggctgatggcggtcgtcggcgctgagtatattctgcgcatggtgccaaaaggcacgcacgacgtgaagaaattcattaagcctgctgaactgttaagctgggtagatgaaaccgtcctgaaagagcaacatatcaccgggctgcactacaacccgataaccaatactttcaaactcggtcccggagtagacgttaactacatgttgcatacccgcgctaaaaaagcctgacatcaaagaattttcctataagggttgcgttagatcatcgggcgcaacctttctcttcgatgaagaaatcagcattcgatcaaattttgatttttttttatgaattgttgacatcctctccaggccttatcagacgcgcatttagcgattcttactcttttacaaccgcaatttaacgccaaaatcaactcttgtactcaaaagaatccctactagaatactcaccatatagcgtttcacttatcgattaccccctatatatagtatttatccacagagttagtcacaacgtggcgttgtggataagcggggggatatttttctttcacggacaggtaaacaggtagaaaaccacatgaatcagagtctgctggtgacaaagcgtgacggccgtactgagcgcatcaatctcgacaaaattcatcgcgtgcttgattgggcggcagaaggactgaataacgtatcggtttctcaggtcgagctacgctcgcatattcagttttatgatgggattaagacctccgatatccatgaaactatcattaaggccgccgcagacctgatctctcgcgatgcgccggattatcaatacctggctgcgcgtctggcgattttccacctgcgtaagaaagccttcggccagtttgagccgcccgcactttaccaccatgtggtaaaaatggttgagcttggcaaatacgacaatcatctgctggaagactacacggaagaagagttcaagcagatggattcgtttatcgttcacgatcgcgatatgaccttctcctacgctgccgttaagcagctggaagggaaatatctggtgcaaaaccgcgtgaccggcgaaatctatgaaagcgcacagttcctctacattctggtagcggcctgcctgttctcgaactacccgcgtgaaacgcgtcttgactatgtaaaacgtttttacgatgcggtctctacgttcaaaatctcgctgccgacgcccatcatgtccggtgtgcgtaccccaacccgtcagttcagctcctgcgtactgatcgagtgtggcgacagtctggattccatcaacgccacctccagcgctatcgtgaaatacgtttctcagcgcgccggtatcggcatcaacgcgggacgcattcgtgcgctgggcagcccgattcgcggcggcgaagcgttccacaccggctgtattccgttctacaagcacttccagacggcggtgaaatcctgttcgcagggcggcgtgcgcggcggcgcggcaaccctcttctacccgatgtggcatctggaagtggaaagcctgctggtgctgaaaaacaaccgcggcgtggaaggcaaccgcgtacgtcacatggactacggcgtacagatcaacaaactgatgtatacccgcctgctgaagggcggcgacattacgctgttcagtccgtcggatgtacccgggctatacgatgcgttcttcgccgaccaggacgaattcgaacgcctgtacgtgaaatatgaacacgacgacagcatccgcaaacagcgtgtgaaagcggtcgaactgttctcgctgatgatgcaggaacgcgcctctaccggtcgtatctatatccagaacgttgaccactgcaatactcacagtccgttcgatccggttgtcgccccggtacgccagtctaacctgtgtctggagattgccctgccaaccaaaccgctgaacgatgtcaacgatgaaaacggcgaaattgcgttgtgtacgctgtctgcattcaacctgggcgccattaaaactctggacgagctggaagaactggctattctggcagtacgcgctttggatgctctgctcgattatcaggattacccgattccggctgccaaacgcggcgcaatgggccgtcgtacgctgggcattggcgtgattaacttcgcctactggctggcgaaaaacggtaagcgttattccgacggcagcgccaataatctgacgcataaaaccttcgaagccattcagtactatctgcttaaagcgtccaacgaactggcgaaagagcaaggcgcctgcccatggttcaacgaaaccacctatgcaaaaggcattttgccgatcgacacctacaaaaaagatctggatgcgatcgtcaacgaaccgctgcactacgactggcaacagctgcgtgagtcgatcaaaacccacggtctgcgtaactccacgctatcggcgctaatgccgtcggaaacgtcgtcccagatctccaacgccaccaacggcattgagccgccgcgcggctacgtcagcatcaaggcctcgaaagacggtattttgcgtcaggtcgtgccggattatgagcatctgaaagacgcttacgaactgttgtgggagatgccgaacaacgacggttatctgcaactggtgggtatcatgcagaagtttatcgatcagtcgatttccgccaataccaactacgatccgtcacgtttcccgtcaggaaaagtgccgatgcagcaactgctgaaagatttgctcaccgcgtataagtttggcgtgaaaactctgtactatcaaaatacccgcgacggcgcggaagatgcgcaggacgatttggcgccttctattcaggacgatggctgcgaaagcggcgcttgtaagatctgatgaatagtgccgggtagcgctatgcttacccggcctacgattgtacggtttgtaggccggataaggcgcttgcgccgccatccggcgctcatcccataaaggattcacttcaatggcatacaccactttttcacagacgaaaaacgatcagctcaaggaacccatgttctttggccagccggtcaacgttgcacgctatgaccagcagaaatatgacatcttcgaaaaactgatcgaaaaacagctctctttcttctggcgtccggaagaggtcgacgtctcccgcgatcgtatcgattatcaggcgttgccggagcacgaaaaacatatcttcatcagcaacctcaaataccagacgctgctggattccattcagggacgtagcccgaacgtcgccctgctgccgctcatttccatcccggagctggagacgtgggtagagacctgggcgttttctgagacgattcactcacgatcctacacccacattattcgtaacatcgtcaacgatccggcggtcgtgtttgacgatatcgtgaccaatgagcaaattcagaagcgcgccgaaggtatctccgcctactacgacgaacttattgagatgaccagttactggcacctgctcggtgaaggcacccataccgttaatggcaaaacggttgtcgtgaatctgcgtgagctgaagaaaaaactgtatctgtgcctgatgagcgtgaacgcgctggaagccatccgcttctacgtcagcttcgcctgctctttcgcatttgccgagcgtgaactgatggaaggcaacgccaaaattatccgtctgatcgcccgtgacgaagctctgcatctgaccggcacgcaacatatgctgaacctgttgcgtagcggcgtggacgacccggagatggcggaaatcgccgaagagtgtaaacaggaatgttatgacctgttcgtgcaggcggcgcagcaggaaaaagagtgggcggactatctgttccgcgacggttcgatgatcggcctgaataaagatatcctgtgtcaatacgttgaatatattactaatattcgtatgcaggcggtagggctggatctgccgttccagacccgctccaacccaatcccgtggatcaatacctggctggtgtccgataacgttcaggttgcgccacaggaagtggaagttagttcttatctggtcggacaaatcgattcggaagtcgataccgacgatctgagtaatttccagctctgatgggacgcgtcacgctgcgtatcactggcacacagctgctgtgccaggatgaacacccttctctgctggccgcgctggaatcgcataacgttgaggtggagtatcagtgccgcgaaggttattgcggctcctgccgtacccgactggttgccggtcaggttgactggattacggaacctttagcgtttatccagccaggagagattttgccctgctgctgcagggcaaaaggcgatatcgaaatcgagatgtaactcagtgcaactcgctggtggaaaccaaaggcatcacgccacgttttttcatctgcacggcatacagtgcgccagcgagtaccaccagcaccgcgccagcgacataaatcatacgatagccaaccgactcaaccatcattcccatgataaaggcgccaatcgccattccggcatccatcgcgttaaagaacagtgaattcgccacgccgattttatgcggttcaaccgagctgataatttgcgtctggaaaaccggcgtgaccgaaccgtagccgataccgatgagaccgccggaaataatcatcatgatgctgccattggtgtagcccagcgccaccagaccgatggtaaaagccaacaggcatgggaaaacaacatatttcggcccttttttatcacaaatattcccggtgaaggtacggcatatcatcaggaaaatcgcgtagcacagcaggaaattactggccgccgccattaaatccagctcacgcgcatacagcgccaggaaagccgatacgccggcataggagaaagtcataaaaaaggtgaccagcgcaaaaggcaaggcggcgcggtcaaacatcgcggcaaaacccagattcggtttcgaaccatcggcatgacgaattaccggagggaccgtcacaatcagggaaagtacaatccctaacgccgctacagcggaacaaagccagaatgcggcagtgaacgcgttccagcgggccatattcaaaccgatccacggtcctacgaccatcgcaaggcccatcgctaaagagaaaaagctgatgccctctccacgtcgggaggccggaattaaccgcgctgaaatagttccttttaccgtggtaataacaccaaacgtaatcccatgaagtacgcggataaagagcagcgactcgatagaatggcaaaccggatacagcgcggtaatcaccaaaaaagccagagaagagagcaccagaatctttttattcgaatattttcccacccattgtccggcaaatggccgaataacaattgccgcggccaggaaacatgtcactaacagcccggccttatctgcagaagcatgcaggcggtcagcgatataaatgggtaataaagttagcagtacataaaaaacaaaaaagataataaaactgactatggtgattgcccaaaaatccttcgtccataatttttctttcattcttaacgacccgctcagatggcgcacgcaggcaacgctcagctcaactgaacacctatcaggtgcgtcaaaatgtgatgtattcgatagaatcgcagtataaacaagtgcactctattagaaaaattaatcgttttaattatattaattaggttttactaatgacactaactcaaatccacgccctgcttgccgtactggagtacggcggatttaccgaggccagcaaacggctatacatgacgcaatccgccgtcagccaggccatctccgcgcttgaggaggagctcggcgttgacatattgattcgtgagcgtcgtaaagagattgagcttaccgccgccggtagccgcatcgtcaggcacttacgcgcgatccagcgcgacgtcaacgcggtaaaagagattgccgaacaagaaaaaaagaacccggcccgtacgctacggattggctgttttcccagcgcctgcgcctgcattttacccggcgtcattcgctattttgaaagccatcatccaaatgtaaaaattatcccctatgaagagaacagtacggctattattgattcgctgcaggacggaagtattgatgccggtttcgttccttttccggtcaacggtatgtattgcgtccccatttaccgggataaattcaccgtagtggtgcctgaaaatcatcccctggcggccaatagtacggtaacggtcgaagaactgatggacgaaccacttattgtcagtaaaggtcgttatgaattaagcattatggcgttgtttaaagaaaagggtattgagccgatatttaaatatgaatttaaccatcccgatactgcgctgaattttattcgccagggattaggtatcgccttattgccagaattaaccttaaaagccacgacaggaaaattatgctccgtggcgctggaacccaccttttatcgacaaatttccctgttagcaaaagaaccgccggtagaaggaagtccgttatttttattacaaaaatgtatggaaacactgaccgatgaggggttgctataaaacaaccccgcctgatggcattgcgtttaccagacttacgctggcaaacgttgcgccaggccggatgaggcgtttatgccctcatccggcgcgtcacttcgactatggcaaacctttagtcatttttttgcaggaacataaccgccttatccgggaagtcagtgaacagcccgtcgacgcccgccttgttatacaggatgtcgtacaactgattgacgtctgtggcatagtccggcaattgatcggcacgcacagtgtaaggatgcactaccatcttattctgatgcgcgtcttgcaccattccagtcagcttgatattccctttcgttgagccttccgcaaccagcatatggtaatccggaccaataccgtccgcatattccgccacctgcttcatagcgcccggcttaaacatccagtcgtagttgtaatttacccaacgaccgtccggctgtttctgctgtgtttcattccagtcggtatacgcaataagttgaaccagattgagatccatccccattttgggttccagttcattcttaatacgtttcagctcagcgacatcaaaacactgcaaatagacattgtcctgcttgccggtgtaaccatacttcttcagcacttccagcgttttcgcggcaatatctttcccttcctgatgatggaaccacggcgctttaatttccggataaataccgatatttttaccggtagagtgatttaatccctgaacgaattcaatttcctcttcaaaggtatgaatgcggaaatcagattttcccatcgggaaacggcccggataagtttgtacttttttgccgttttcaatatcaaacccttcggtaaacttcagggatttaatttcatccagcgtaaaatcgatagcgtaatagcgcccatctttacgcgcccggtccggaaaacggtcagcgacgtcagtcacccggtcaaggtagtggtcatggaggacgaccagatggtcgtcctttgtcatcactaaatcctgttccagataatctgccccttgcgcatacgccatcgctttcgccggtagcgtatgctccggcagataaccgctggcaccacggtgggcgataacgactttttcagccgccacggcgccgcttccgatggtcattcctgccaacattaacgccacgctaaggtttttcagtgtggttttcatgttattagcctccgttgcgttttaactgcagctcatcatgatggcgtttttcaccaatcatcacgaccaccagcaggattaccgccagaatgctgccgccaatcatcaccataaagccgccatcccaaccgaagaagtcaacggtataacccacaatggcgcttgcagcgacagaaccgcccaggtaaccaaacagaccggtaaagcccgccgccgtacccgccgcttttttcggcgccagttccagcgcgtgcagaccgatcaacattaccgggccgtagatcaggaagccgatgataatcatacaagccatatcaacgttcgggttccctgccgggttcatccagtaaacgatggtcgcgatagtcaccagggtcataaagaacacgccggtcgcaccgcggttgccgcggaagactttatccgacatccagccacacagcagcgtgcccggaatacccgcgtattcatacaggaagtaggcccaggaggatttatccagtgcgaaatgcttcacttctttcaggtaggtcggcgaccagtcgaggatgccgtagcgcagcagataaacaaacacgttggcgatagcgatataccatagtaatttgttcggcagtacgtactgcatgaagatctgcttcgcagtcagctcttcttccgctttttcgttgtagtcgtccggatagtcgtttttatactcttcgataggcggcagaccgcaggattgcggcgtatcgcgcatcattgcgaaagcgaacagcgccaccacaatcgcgccaaaggctggcatatagagcgccgctttccagtcgttaaaccacgccatccccagcaggaacagcagtggcgggatcccgccgccgacgttatgcgcacagttccagaccgacacaatgccgccgcgctctttctgcgaccaccagtgaaccatcgtacgtccgcacggcggccaccccatcccctggaaccagccgcaaaggaacaacagcacaaacatcacggcgatgctggatgtcgcccacggcacaaagcccataaacaacatgactgctgcggccagaatcaaccctgccggcagaaaaacgcgcggattcgagcgatcggacaccgaacccattataaatttcgaaaaaccataagcgatggaaatcccggacaacgcaaagcccagatcgccgcgtgaaaaaccctgttctaccaggtagggcatcgcgagggcaaagttcttgcgcaccagataatacgcggcatagccaaagaatatccccaggaaaatctgccagcgtaatcggcgataggtcggatcaatctccgccgctggcaagcgcgctttatgcggcgctggtttaaaaatactcaacatattgtagcctccgtggcccatattttatttagaggtaaacaccgcagttcgttcaaacaaccccgctgctcccagtgtggccgcgatgttaagtaaagatacgtcacgttaatgtgaattacagcacatattgttacagatttatgactaatgttcagaaaggcgcacgaaatcacgtttcattttcgaatagtgagcgattatgcgcgaaatcaaacattccatatgatttgtatggctaaatgataaaaaacgaactgtgaggaaaaacaatgaaaactcgcgactcgcaagcaagtgacgtgattatcattggcggtggagcaacaggcgcagggatcgcccgcgactgcgcgctgcgcggtttacgtgtcattctggtggaacggcatgatatagcgaccggcgcgaccgggcgtaaccacggactgctgcacagcggcgctcgttatgcggttaccgacgcggaatccgcgcgcgagtgcattagtgaaaaccagattttaaaacggatcgcccgccattgcgtcgaaccgacggatggtctgtttattacgttgccggaagatgatcttgcgtttcaggccacctttattcgcgcctgtgaagcggcgggcattcgcgctgaagccatcgatccgcagcaggctcgcatcatcgaaccttccgttaaccctgcgctcatcggtgcggtaaaagtgccggatggcaccgtggaccctttccgccttaccgccgccaatatgctggatgccagagaacatggcgcaatcgtgttaacggcgcatgaagtgaccgggctcattcgtgaaggcgcaacggtctgcggcgtccatgtgcgcaaccatctcactggcgaaacccagacgcttcacgcgccggtggtggtcaatgcggctggtatctgggggcaacggatcgccgaatacgccgacctgagtattcgcatgttcccggcgaaaggctcgctgttgatcatggaccatcggatcaaccagcatgtcattaaccgctgccggaaaccatcggatgccgacattctggtacctggcgatacgatttcattgatcggcactacctctacccatattgattacaatgagatagacagcaaccgcgtcaccgcagatgaagtcgatatcctgctgcgtgaaggggaaaaactggcccctgtcatggcgaaaacgcgtattctgcgcgcgtattccggcgtccgcccgctggtggccagcgatgacgatcccagcggtcggaacgtcagccgcggtattgtgttgttcgaccacgccgaacgcgacgggcttgatggcttcattaccattaccggcgggaagctaatgacttaccgcctgatggcggaatgggcgaccgacgccgtgtgccgcaagttgggcaatactcgcccctgcatcacggcggatacgccgttgcctggctcaaaagagtccacggaacatacgctgaaacgcattatctcgcttcccgcgccgctacgcggatcggcggtttatcggcatggcgatcgcacgccggggtggctgagtgaaggccgccaacaccgtagcctggtctgtgaatgcgaggccgtcacggcgggggaagtgcagtatgccgtcgaaaacttaaccgtgaatagcctgctggatctgcgccgtcgcacccgcgtagggatgggcacttgccagggcgaactgtgcgcctgccgcgcggccgggctattgcagcgttttaatgtgacgaccgcggcgcaatctattacgcaactctctgaatttctgaatgagcgctggaaaggcgtacaacctgtcgcctggggagacgcgctgcgcgaaagcgaattcacgcgctgggtttatcagggattatgcggtctggagaaggagcaccaggatgaaatttgatacggttattatgggcggcggtctcgccggtttgctatgcggactgcaactccagcagcatggattacgctgcgccatcgtcacccgcggacaaagcgcgctgcatttttcctccggctcgctggatctactcagcgccctgcccgacggccaaccggtgaccgacattaccgccgggcttgatgcgctgtgccgccaggcgcctgaacatccttattcgcgtttaggcgcgcaaaaagtccttacgctggcgcaacaggcgcaaacgctacttaacgccagcggcgcgcagttatacggtgacgtacagcaggcgcaccagcgtgtcacgccgcttggcacattgcgttcaacctggcttagctcgccggaagtaccggtctggccgttatccgcacagcgaatttgcgtcgtcggcgttagcggattactggatttccaggcgcaccttgcggcagcgtcgctgcgccaacgcgacctcaacgtggaaaccgcagaaatcgaccttccggaactggacgtactgcgtgataacccgacggaatttcgcgcggtcaatattgcgcgtctgcttgataacgaagaaaaatggccgctgctgtacgacgcgctgtcgccaatagcgacaaactgcgacatgatcatcatgcccgcctgtttcgggctggcgaacgatacgctgtggcgctggcttaacgaacgtctgccctgcgcgctcacgctgctgccaacgctgccgccatcggtgctcggtattcgtctgcacaatcagctccagcgccagtttgtccgtcagggcggcatctggatgccgggcgatgaagtgaagaaagtcacctgccgtcgcggtaccgtgagcgaaatatggacccgcaaccatgccgatatcccactgcgcccgcgttttgccgtacttgccagcggtagcttctttagtagcggtctggttgccgagcgcgaagggatccgcgaacctattttagggctcgacgtacagcaaacggccacccgcgccgaatggtatcaacaacatttctttgacccacagccctggcagcagtttggcgtcgtgacggatgacgccttccgcccctcccttgcgggcaacacggtagaaaatctgtatgcaataggttctgtgctggcgggattcgatcctatagctgagggatgcggcggcggtgtctgcgcagtcagcgccctccaggccgcgcaccatatcgctgagcgtgcaggagaacagcaatgagcgacacacgttttgaaagttgtattaaatgtacggtgtgcaccaccgcatgcccggtcagccgcgttaatcctggctaccctggccctaaacaggccggaccggatggcgagcgcctgcgtctgaaagacggcgcactgtatgatgaggcgctgaaatattgcattaactgcaaacggtgtgaggtcgcttgtccgtcggacgtgaagattggcgatatcatccagcgcgcccgcgcaaaatacgatacgacgcgcccgtcattgcgtaattttattctcagccataccgatctgatgggcagcgtttcaacgccgttcgcgccggtggtcaataccgccaccgcattaaagccagtgcgccagttgcttgattacgcgctcaaaatcgatcatcgccgcaccttaccaaaatactctttcggcaccttccgccgctggtatcgtagcgtggcggcgcagcaggctaaatacaaagatcaggtcgcctttttccatggctgttttgtgaattacaaccatccgcagctcggaaaagatctgattaaggtgctgaacgcaatgggtactggcgtacagttactgagtaaagagaagtgttgcggcgtaccgctgatcgctaacggttttacggataaagctcgcaaacaggctatcagcaatgtggagtcgctacgcgaggcgattgccgtcaaaggtattccggtcatcgccacgtcatccacctgtacgtttgcgttgcgcgatgaatatcctgaagtgctggacgtggacaacgccgggctgcgcgaacatatcgagctggccacccgctggctatggcgcaaactggatgccgggaaaacgctgccgcttaatcctttaccgctgaaagtggtctaccatacgccgtgtcatatggaaaaaatgggctggacgctttacacgcttgaactgttgcggcaaattccggggcttgaattgacggtacttgattcacagtgctgcggcattgccggtacgtatggatttaaaaaggaaaactatccgacatcacagtccatcggcgcgccactgttccgccagattgaagagagcggcgccgacattgtcgtcaccgattgtgaaacctgtaagtggcaaattgagatgtctacaagcaaacgctgcgaacaccccattacgctactggcccaggcgctcggctaagtaaaaagcgccggagcccctccggcgctattaccctactcaccagggacgattttccatcagacatatacccttcatacttcaagttgcttatgtgttggctacggattattttgggtataaacgcggatgtctctttgcaataacctgccctatttggttaaccatgaccgctaacccacggtggcatgacagataacgacgttactgtttatagagcaatatctcttgtatcgccgcgttaccagcctcctttaaagagggggataactgaatatctccaataataattgagtgttatgtgaataataataaaatcaggtctatgcctgatttaatatatctcccactaacaataatatttttacaaataattatacatgacatcatattcgttactttcacctaccaggaaacagagcaaaatgaatatatgtgtaaattcactttaccgattgagcacaccgcaatttcacagtttatattcagaagatgtgagcgatgaggcgcttgcgttgttgattggcgaagtagagaacggtaatcagaattgtattgatctgttatgcaatcttgcgttacgcaacgatgacctgggacataaagttgagaaattactttttgatctctttagcggaaaaagatcgggatcaccagatatagacaaaaaaatcaatcaggcttgccttgtattacatcaaatcgccaataacgatataacaaaaaataatactgagtggaaaaagctacatgccccttccagattactttatatggccggttcagcgacaaccgacctttctaaaaaaataggaatagcacataaaattatgggcgaccagttcgctcagacagatcaagaacaggtaggagttgaaaatctttggtgtggtgcgcgaatgttgtcgtcagatgagctggcagctgcaacgcaaggtctggttcaagaatcacctcttctctcggtaaactatcctattgggctgattcatcctaccaccaaagaaaatatattaagcactcagctacttgaaaagattgctcaatcaggattatctcacaatgaagtcttcctggtaaatacaggagatcactggcttctctgtttattttataaacttgcagaaaaaataaaatgccttatatttaatacttattatgatttaaatgaaaatactaagcaagagattatagaagcagcaaaaattgcaggtatatcagaaaacgaaaatattgattttattgaaactaatttacaaaataatgtacccaacggctgtggtctattttgttaccatgcaattcaactcttatcgaatgcaggacaaaacgatcctgctaccacactacgagagtttgcggaaaatttcttaacgctttcagtagaggaacaaacactatttaacacccaaacccggcgacaaatatatgaatacagtctccagtaatggcgagtacttatcctgaaatgatgctctgccaagaatttataagtatataaggatgggaaggccaggccttcccactaaaagttctatgccgtcaatgattcaaccacgtctatccagccatgctcgctggtaatgtcctcgccattaagccaacggcgcagcatatttagcgccatcaccgcacaaacctcctgacgtattgccagactataccgataggcgctaaaacgcatgcgtaaggcatacgtgccatccggcatttttctcaataactacgttttgccgtgcttactgactgaacagatttaaacatcgccaacctgctgtccagcgcctcggtgtagagcatcgtatctaccccgaccgcgacaaaattcgcgccccacgccagacatttctgcgccattgccggatcgaccgccaaaaaacccgccgcttttccggcagcgcgaatacgataaatacacgattcaatgattcgctgcacttccgggtgtccggcattatcggggtaacccaatgaagcagagagatctgccggaccgataaagacgccatcaatgccttcaacctccagaatcgcgtcaaggttttccagcgccactttgctttcaacctgcaccaacaggcagagcgactcattggcctgtgccatatagttgtcgattctcccccagcgcgccgcacgcgccacgctcgcgccaacgcctcgttgccccaacggcgggtatcgggtagcggaaacgacctggcgcgcctgttctgcggtgtcaaccatcgggatcagtagcgtttgcgccccgatgtccagtacctgtttaatgagcgctttacttccctcgatcgggcgaatcaccggctggctggcgtatggggcgatggcctgtaactgatgatacaagtcctgcaccgtattaggcgcgtgctcgccatctattaacaaccagtcataacccgacgtcgccgcaatctccgccatataagaggtggttgaactgagccacaaaccaatttgcgtatcccctttacgtaatccttctttaaaaggatttgataacaatgcgttcatagcgatccttacaacgtagataagattaatgatgcgcagcgccggattgcgccaccggacgattaacgctcagcgtgaagataattaatgagccaatgatggcgactccggccagcgtcagcaggcccgccgcatcgctggcaaacaacgtttccgcttttacgcgcagaattggggcaataaaaccgcccacagcgccaaacagattaacgaaaccaattcctgccgccagagccgtaccggaaagtagctgcgtcggcatggtccagaatacgggctgaacggcaataaatcctactgctgcaacacagagcgccagaatagcgagcaccggagaaaccagacctgacaggccaatgccaatacccgcagccagtaacgtcactgccgcaacgttacggcgatcgccggtacggtcggagtagcgaggaataagccatgtgccaagcaaagccgccacccagggaaccgctgttaccaccgaagcggtaaagcccactttagtgcccaatagcgcggcaacctaggtcggcaggaaaaagatgagtccgtataccgccacctgaatcgtcagataaataatagccagttgccagacgcgtccattacgcagcgcatccgcaagccttgacgtgacctttttctcttcttcgctcgccagttgcctgataagcgcgttcttttcttccaggctaagaaaacgcgcctgctgcggagtgtcatcaagccagaaaaaggtgaatatccctgcgccaatcgccagtaggccttcgataacgaacatccagaaccatcccgggtgccccataaaaccatgcatctccagcagagcgccggagagcggcgaacccaacgttaacgccagcggcgcgcccatataaaatagccccataatgctggcacggttacgctgcgggaaccattgtgaagttagatagatcatgccggggaaaaatccagcctccgccgcgcccaatagcgtgcggattatcaggaattttgcttcactatccgcccaggccatcgcagcagagagaaagccccacagcagggtagtcgtgccgatccaggttcttgcgccaaatttgcgcatcagcaggttagccggtacgccaaggaaagcgtaaaccacaaagaaaataccggcccctagcgcgtaggcttcattacttagcccggtatctatctgataggtctctttggcaaaaccaatatttgaacgatccagaaacgccagtacatacagtgccaacataaaaggaattaaacgtgcgcggtttttcttcactacgccgtcaagtaaagtgatgctcatagcaatatcctcaacaggatgagggcgttgccgtacaaaggcaacgcacgagttattagtggctataagggcgtttcaagtgacagtcacggttaagctcgacgccgaagcccggcttatccagcactgatttatggatgcgtccattcaccggcaccggctcatccaggagaatcgggtcaaattgcggacgcagggtggaacagtccgggctggtcatcaggaactcgctgaaaggggtattagtgaaagtaataactgcatggtgcgaatagacagacgaaccgtgcggcaccaccagttgcccgcgcgatttggcaagcgcggcgatctcaaccagcgtggttaatccgccgcaccaaccaacatccggctgcataatatcaatgccggtttctgccagagtgcggaaggattgcagcgtaccatggtgttcgccgctggtaaccatcatccctgcaggcgcgttgcgttttaattcgcgatagccttcatactgctgcggcggcagacactcttcaatccatttgagattaaatggcgcacaggcgtgagccagtttagtcgcatagttcacatcctgactcatccagcagtcgagcatcagccagaaatccggcccgcacttttcacgcatatccgccaccatcgcggcatctttacggatccccgcatcaccatcgtgcggcccccagtgagtcggcattttaccgccgataaagcccatttctttagccagatccgggcgtgcgccggtggcgtaaaactgaatttcatcgcgcaccgctccgcccagcaatttataaaccggcagcccaaccaccttgccaaacagatcccacagcgccagatccacacaggaaatcgtgttcatcaccagaccgccggaaccggagtagtacatggtcgcgccgagcatctgatcgtgaataagtttgatatcgcttacgcatttgccttcaataaaccggttaagatgtttttctacgataaaacagcccatctcccctgctgtcgaaacggcgaaccccgtctgcccattttccgcctctacttcgacaatcagcgtccctaacacgttgattccaaaagactgacgagactgctcatagtcgcgatatttgctcatgggagtggcgatatggtcatcaatccagtgatttcctccctggtcgtgataatccccgccgccagcccctttctctgcggtagcgcccccaataaaccaggctcgaacgtgtttaattttaggaagagtcataatattctccattttaagatgcgagtgagtcgaagggacttttccatcccaacaggcgtgaaatatctttggcacaggcaatagctttaccggccaaataatcaagattctcttcgttgatttgcaggcgcgtgccgaccactgaaattgccgcggtcagttcgtttctggcattaaataccggtgcggcaacgcagcggacatccggataatcctccccgttatcaaagctccatccacgctggcgaatgcgttccagctcatcattcaattgttgcggctcggtgatggtggtcagcgtggctcgctcccataccagttgttcaataatggctttgcgtacggcggccggctgccatgccagcaggcatttgccgatgccggaacgataaagagagaggcttttcccctcatgcgagcgcacgctgatagtggatgaggattccactttcagtatgtaatacgcattttcgtggtcgatgatccccaagtgacacagcagcccggtttcatccatcagttgtgttagacgaggacgcgccagctcccgcagatccatcttgctgagcgcatgacccgacaattcaacgagcttagtccacaggcagtagttatcctgatgatcgaggctaataaatcgctgacgttttaattcattcaacagcaggtacgcggtgctttttggaatacgcagcgtttcaataatgattgccgcgctgcatgggccaatacgcgcgatcaaattgaggatgtcgattgcgcgagtaagagccgggactttacttgattccaacatattggactccagtctgagacactggaatcagtgtgaaaggtcagtagggaaaaaattgtgaagcgcgtcaaagcttatccgccttccaacggagtggaagggttaaccatataaatgtgaattaacgcacgtattactttgtattcagtacaattggctggacaaaaaagcagatgatattgccggataatggcatagcggccttatccggctcacgatgtcgttcccatcgcagataagagaaagggattatgatgtcaatgattcaaccacgtctatccagccatgctcgctggtaatgtcctcgccattaagccagcggcgcagcatatttagcgccatcatcgcgcagacctcctgacgtattgccaggctataccgattggcgctaaaacgcacgcgtaaggcatacgtgccatccggcgtcgccagcgcgaaattaagatgttcgttttccagccccgacacggccagcgccagaccggcataatgattgctgcgccgttctgtcgtccagtgcgccgtttgcgccagcgtctcttcctgagaaggaacgacttcgctggcaagaacaggcgccccggcgcgggaaagctgtagcgccagtaagccgctggtgtattgctcgctcaacgtcagactcaactgcctttcctgcaggcggcgggctatttgcgccggcaggttttccgtaccttcaaaaatcaggttctgcccggcaacccgtttgacctctggccataacgccagcatcgcctcccgttgcgtagccgggccggtcaatttcagttcaatgatcggcattgatgagcgataccccatcgtcaccccgggcggcaacggcagtgaatcgagacgctgcgcgaggtcgctttctgaacgtccaaaagtcgttaaccgcaggcaaagcggcggctccggcagcgaaaaacgcgcgcgtaaccgcggtaagatttccttctccaccataaccttaaattccgacggtacgccgggggtgaaaaacatcaggcagcggttgagctggagcgcaaatccacaggcagtgccgaccggattattaataaactccgcgctggcaggcagttccgcctgtttacggttgctcggcgccatcacgcggccacgctgctgaaagtagcgttccatttcggtcagccacgcctggtgcagtactaatccttcgccttttgccgttgccgcggcgagcgcgcttaaatcatcgctggtcggccctaacccgccattaacaatcaaaacatcagcatgttgactgcgttcacgcaagatagcgaccagactgtccagattatcgcctaccgtatttcgccgtgataacggaacgccctgatgaaagaaaaaatcagccagccaggcggcattggtgtcaacgatttgtccgtgcaacacctcatccccggtggatagcatttccacatttagcattgtgttctcctgctcttatgatgaaaacactataacgcaaagaggaataggacgtggaaagaagaatgacgggaaaaggaggaatatggcgcgacgattgccgcgccgttagcatcaaaagctggcgtttacgccaacataagggccgtcagcaatcgcattatcgcggttgccgtctttacccgccaggttcaggtaacgataaccggcttcaatgctcagcgggcgcataatggtgaaacgcgcgcctgcattcgcttcttcataactgtcgataccgctggacagcgaatctggtgaataataatactcgccgaacagacggaagctgttgccgattttccattgtagcccaccgccgacagccgccgcatagccttcatcgctgtctttcggattggtataaatacctttaccgcctaccgtcgccagcagcggtcccaccggaatgttcagccccagacccacgcccgcagcatcgccatcatcatcgttgtgcatccagttgccgcttagcgccagtcccgtcgattccgtaccaaaacccacgccaatgttggtgtaatcttcgcccgcctggccgctaatactgatggcctgcgccgatgcagaaacgaacagcattccggcaaaacctaataatatgctttttttcatttttaccctttccagcaagcacataaagaaaaactccccaaaacggcagaattgtactgccagacgctgaggaatcaatgcactaagaaaccattccaaaaacatattgtaacgaaatactactttcgccatgccgcatcattgcgccatcacatggtgacgcctgcatcaacaggattaacaaaaaacgcagtctgcgttatcgcttccatttttcacaaagaatttcgcagaatgatttgttaagctgatgacctggtggtttaaggaagcgacttatgcgtcaacgaactatagtttgcccattaattcaaaatgatggctgttatctgctgtgcaaaatggccgacaaccgcggcgtctttcccggtcagtgggcgctgtcgggcggcggggtcgagccaggcgaacgcattgaagaggcgctgcgtcgggagattcgggaagaactcggcgaacaactgattctgagcgatattacgccgtggaccttccgcgacgatatccgcgttaaaacctacgctgatggcagacaagaagagatttatatgatttatctcatcttcgactgtgtttccgctaatcgcgatatatgtattaacgacgaatttcaggactacgcctgggtcaagccagaagaactggcgctgtatgatttgaatgtagcgacacgccacacattagcattgaaagggttattataatgacgacagccgcttcaggctgtctttacgcttttaacatgcggctagccgggaacaaattcaccatctaaaaagagttttccgttttccgcatgcataacgagcgcattaagatagtccggatcaaactttacgccgcgcttattttttgcaatatacgtcaaacaatgattatgggtaaaaatgactatatttttattctgcgactttttcagtaacgtattgattgaagcataaataccgctgccgcaatccatcatttttttatccaccgtaagcgacctgcccgcagaaaaccaggttgccgactggatggtgcgcaccgtattactggaatagagattgtaattttgtatatcggcactgaaggctttacccagcgctctggcatcttgcgcacccttgaccgtaatccccgtgctgtctgacaggcaggtattatcggaacgatcgcaccgctcggcatggcggaataacacgactaccggatgctgcttcgccagcgccgccagcgctttaccgttaatctgcggtagaccgttaccactccaggcatgttgtgaggtcaacccggcgataataaccaacgcccccgccagaatcgcgaaatagcgtttgtttttaataaagcgtagggtaaatgccagcacattaacctctcaggcagacagtgcagctaacttaatagcaatacaattaaaatgaaattccgcgacggaagaccaggccagaaacataaaaacagcttttgggcatgcataaaatgccttaaactttcggcgaaagcaaagcataattccgttaaaaattatctttttacttcaccttaatttcttaatgttaatttaatcttcatccagtagggttcagctaaatgcgttaaaaaataagcccttttctattgccgaaatatttgaaaagcggctttcaatggctgaaggaaaaatgatgtcggactttttgcctttctcccgtccggcgatgggcgcggaagagctcgctgccgttaagaccgtactggactcaggttggataacaaccggcccgaaaaatcaggaactggaagcggcgttttgtcggctaactggcaatcaatatgccgttgccgtcagttcagccactgccggtatgcacatcgcgttgatggcgctgggcattggtgaaggcgacgaggtcattacaccgtcaatgacgtgggtttctacgctaaatatgatcgttttactcggcgcgacccccgtcatggtcgatgtcgatcgcgatacgctgatggtcacgcctgaacatatcgaagccgcgattacgccacaaaccaaagcaattatccccgtccactacgctggcgcgcccgccgatctggacgctatttacgctcttggcgagcgttatggcatcccggtgattgaagacgcggcgcacgcgacaggaaccagctacaaaggtcgccacattggcgcccggggcaccgcgattttctccttccacgccattaagaacatcacctgcgctgaaggcggtatcgtcgtcacggataacccgcaattcgccgataaactgcgcagtctcaagtttcacgggcttggcgttgatgcctgggatcgacagagcggaggacgcgcgccacaagcggaagtcctggcgccgggctacaaatataatttgcccgacctcaacgccgctatcgcgcttgctcagttacagaaactggatgcgcttaacgctcgccgcgccgccatcgcagcgcagtaccaccaggcaatggcagacctgccttttcagcctctgagccttccgtcgtgggaacatattcacgcctggcatttattcattatccgggtcgatgaagcccgttgcggtattacccgggatgctctgatggcatcgctgaaaacgaaaggcatcggcacagggctgcatttccgcgccgcgcatacgcaaaaatattatcgcgaacgtttcccaacgctcacgctgcctgacaccgagtggaacagcgagcggatctgctcactgccgctcttcccggacatgaccgagagtgactttgatcgggtcattaccgcccttcatcagatagcaggacaataagcatgtttgacgccgcccccataaaaaaagtctcggtggttattcctgtctataacgaacaggaaagcctgccggaattgataagacgcaccaccgccgcctgcgagagtctgggcaaagcgtgggagattttattgatagatgatggtagcagcgatagctcggcggagctgatggttaaggcgtcccaggaagccgatagccatatcatctctattttactcaaccgtaactacggtcaacatgcagcgatcatggcggggtttagccatgtaagcggcgatctcatcattacgctggatgccgatctgcaaaacccgccggaagagatcccgcgcctggtggcgaaagccgatgaagggttcgatgtggtaggcaccgtgcgccagaaccgacaggacagcctgtttcgcaaatcggcgtcaaaaatcattaatctactgatccagcgcacaacgggcaaagcgatgggcgattacggctgcatgttacgtgcctatcgccgccctattatcgatactatgttgcgctgccatgaacgcagcacctttatccctattctggccaacattttcgctcgtcgggctaccgagatcccggtgcatcacgctgaacgtgaatttggcgactctaaatacagttttatgcgtctcattaacctgatgtatgacctggtgacctgcctgacgacgacgccgctgcgcctgttgagtctgctgggcagcgttatcgccatcggcgggtttagcctgtcggtattgcttattgtacttcgcctggcgctggggccgcagtgggcggcggaaggcgtatttatgctctttgccgttctgtttaccttcatcggcgcgcaattcatcggtatgggactgctgggcgaatacatcggtcgcatttataacgatgtccgcgcccgcccccgctattttgttcaacaagttatctacccggaaagcacgccgtttactgaggaaagccaccaatgaaagccgttatttttgcctatcacgatatgggatgtcagggggtgcaggccgtactggatgccgggtatgagattgccgcgattttcactcatgccgacaatcctgcggaaaacaccttttttggctccgtctcccggctggcggcagaattagggattccggtttatgcaccggataacgtaaaccatcctatctgggtcgaccgcatcgctgagcttgcgccggatattattttttcgttctattaccgcaacctgttaagcgaagaaattctgcacctcgccccggctggcgcgttcaatctgcacggttctctattgcctgcctatcgtggccgtgcgccgctaaactgggttctggttaacggcgaaagcgaaacgggcgtaacgctgcatcgtatggttaaacgtgccgacgccggagagattgtcgccagtcaacgcgttgctattgcgcaggacgatgttgcgcttaccctgcatcataagctatgtcaggccgcgcgccagttgcttaatagcatcctgcccaccatgaaatgcggcgatataccttctgttccccagcgtgagtctgacgctacatattatggtcgccgcaggccggaagatggccttatcgactggcacaaaccggtttccacggtgcataacctggtgcgggcggtagccgccccctggcccggcgcgttcagctataacggctcgcaaaaattcactatctggtcttcccgaatttgtccggatgcgcagggcgcgcttcccggctcggtaatttcggtctctccgctgcgggtcgcctgcgctgatggcgcgctggagattattaccggccaggccggagacggcattactgtacagggctcgcagcttgcacagacgcttggtctggtggcgggcgcgcgtttgaaccgtccaccagcgaccagcggtaaacgtcgcattcgcgttctcatcctcggcgtcaacggttttatcggcaatcatttgaccgaacggttactgaatgaagagaattacgaggtctacggtatggatatcggcagcaacgccattagccgattcctgctccaccctcgatttcatttcgtggagggagatatcagcatccactcagaatggatcgaatatcatgtcaaaaaatgcgatgtcgtactgccgctggtagcaattgcaaccccgattgaatacacccgcaacccgctgcgcgtctttgaacttgattttgaagaaaacctgcggattatccgttattgcgtgaaataccgtaaacgcgtggttttcccgtctacctctgaagtgtacggcatgtgtacggacgcctcttttgacgaggacaaatcgaatctgatcgtcgggccggtgaataagccacgctggatttactccgtttccaaacagcttctcgaccgggtgatttgggcttatggcgaaaaagagggattgcgcttcacgcttttccgtccctttaactggatggggccgcggctggatagcctgaacgcggcgcgtatcggcagttcacgcgcgataacgcagttgattctgaacctggtagaagggacgccgataaagcttatcgacggcggtcagcagaaacgctgtttcaccgatattcgcgatgggatcgaagcattattccgcattattgtgaatgatggcgatcggtgcgatggcaaaatcattaatatcggcaaccctgacaacgaagccagtattcaggaactggcgacgctgttgctcgacagttttgataagcatccgctgcgctgccatttcccaccgtttgccggtttccaggtcgtcgaaagccgtagttattacggcaagggttatcaggatgtcgcacaccggaaacccagtatcgacaatgccaggcgctgtctgggctgggaaccgtctattgcgatgcgtgatacggttgaagaaacgctggacttcttcctgcgcagcgtagatgtcgcggaacgcgcatcatgacgaaagtcggtttacgcattgatgttgataccttgcgaggaacgcgtgaaggtgttccccggctgctggcgacattgcatcgccacggcgttcaggccagctttttcttcagcgtcgggccggacaatatgggacgtcatctttggcgtctgataagaccgcgatttttatggaaaatgctacgttcaaacgccgcttcgctctacggctgggatatcctgctggccggtaccgcctggccgggaaaaaatatcggcaacgccaatgccgggattattcgtgaaacggcaacataccatgagacgggactacatgcctgggatcaccatgcgtggcagactcacagcggccactggagtatccgccagcttgaagaagatatcgcgcgcggcataacggcgcttgaggccattatcggaaaacccgtcacctgctcagccgcggccggctggcgagcggatgggcgcgttgttcgtgcgaaagagccgttcaacctgcggtataacagcgattgccgtggaaccaccttattccgtccgctactgatgccgggccagaccgggacgccacaaatcccggtcaccttacccacgtgggatgaggttatcggccccgccgttcaggcgcagtcgttcaatacctggattatctcccgtatgttgcaggacaaaggcacgccggtatataccatccatgcggaagtcgaaggtattgtccatcagccgctgtttgaagatttgctcgttcgtgcacgtgacgcggggatcaccttttgtcctctgggcgaactgctgccgacatcgcctgagtctctgccgttggggcaaattgtacgtgggcacatccctggccgtgaaggttggctggggtgccaacaggcagcgagcgcctcatgatgaaatcgatacgctattatctggctttcgccgcatttatcgcgctctactatgttattcctgtcaatagccgcctgctctggcagccggatgaaacgcgctatgccgaaataagtcgggagatgctggcgtctggcgactggatcgtgccgcattttctgggattacgttattttgaaaaaccgatagccggttactggataaacagtctgggtcagtggctttttggcgctaccaattttggcgtgcgggctggcgctattttaacgacattgctggccgcagcgctggtggcgtggctgacgttccgcttatggcgggataaacgtaccgcgttgctcgcctccgttatctttctctccctctttgccgtttacagtatcgggacgtatgcggtactcgacccgatgatcgcgctttggcttacggccgggatgtgttgtttctggcaggggatgcaggccacgacccgaacgggcaagattgggatgtttttgctactgggcgcaacctgcggtctgggtgtattaactaaagggttcctcgccctggccgtaccggtggtgagcgtgctgccgtgggttattgttcagaaacgctggaaggactttttgctatacggctggctggcggtcttgagctgctttgtggttgtccttccctgggcgatcgccattgcgcgacgcgaagccgatttctggcattactttttctgggtggagcatatccagcgattcgccatgagcgatgcccagcataaagcccctttctggtactatctgccggtactgctcgcgggaagtttaccgtggctggggttactgcctggcgcgcttaaactgggctggcgcgagcgaaacggcgcattctatttgctcggatggacgatcatgccgcttctctttttcagcattgcgaaagggaaactgcccacctatgttctttcctgtttcgcaccgatagcgatactcatggcgcgcttcgtcctgcataacgtaaaagaaggcgtcgccgcgctacgtgtcaacggcgggatcaacctggtgttcgggataatcgggatcgtcgcggcgtttgtcgtctcctcatggggcccgctgaaatcgccggtgtggacgcatatcgaaacctataaagtgttttgcgtctggggcgtctttactgtttgggcgtttgtgggctggtatagcctctgtcatagccaacaatacctattacccgcgttttgtccgctgggactggcgctgctgttcggcttttccatccccgacagggtgatggagtccaaacagccacagttttttgtcgaaatgacccaggcgcctttggcatcaagccgctatattcttgccgacaacgtcggcgtcgccgccggtctggcctggagtctgaaacgagacgatattatgctctacggacacgcgggcgaactcaggtatggtcttagctatcctgatgtgcaggataaattcgttaaagccgacgattttaacgcctggctcaaccagcatcgtcaggagggcattattacgctagtactttcaatagccaaagacgaagacatcagcgctctttcccttccccctgcggacaatgttgattatcaggggcgtctggtgttaattcagtatcggcctaaatgatcggcgtcattctggtgcttgccagtctgctcagcgttggcggtcagctctgccagaagcaagcgacacggccattgacggtgggcggacgccgccgtcacttgatgctgtggctgggcctggcgctgatatgcatgggtgcagcgatggtgctgtggctgctggtgctacaaaccctgccggtgggaattgcttacccgatgttgagtctgaattttgtctgggtcacgctggcggcctggaaaatctggcatgaacaggttccgccccgccactggtttggcgtcgcattaattatcagcggcattatcattctggggagtgcggcataatgggcgtaatgtggggactgataagcgttgcgattgcctccctcgcccagttgagtttaggattcgccatgatgcgactgccatcgatagcgcatccactggcgtttatttccgggctgggcgctcttaatgccgcgaccctggcgctattcgccggtttggcggggtatctggtttccgtcttctgctggcataaaacattacacacgctcgcgctcagcaaagcctatgcgctgctgagtctcagctatgtgcttgtctgggtagcctcaatgttgttacccggtttgcaaggcgctttcagcctaaaagcgatgctcggcgtattgtgcattatggcgggggtaatgctgatttttctgcccgccagatcatgatggcttgcgcgtcaaccgctgccattcgtcgcaggaataacagcgtgcatcaacgatttttaaggtctggtgtttttcccgattaatacaatactgcgcatcctgtaaaggcgacaggatatcgccgggactcagtaatatcatggaattcgcctcggcgatcatttttagcgaaccgccgctatcgcacagcaccagaacatggcacgccctctttttgacataatgcgatttcttaaccaaccattccatagcgcccccgtttcacgctgattgttcataacacgttacacatcaacggataaacaaaacggcaatagcgatggaatggttgtatattaacctaacattaatttttacagttctcacacacccactgctggagcgcacggcgagatattttaatccctccgtttttcagttctgacggcagcgtcaaccagcgaaccggctgctgaaaacgcgccaacttatcgcggacccattcagcgaggttcacgtctccggcctgcgatgcatactccacaaccgcaacgggacgatggccaaactctttatcttctaccggcacgacgaaggcttgttgcactagcggatgcgcattaataacgcgttcgacttcctccggctgaatgccttcgccgccgctaaagaacaggttgtccagccgcccggcgatggttagcctgccgtggttcagatcgccgcgatcgcgcgtggcaaaccagccctcgtcattaaccagcgggatcagtttgccatcacgccagtaaccttccgccatactggcggcgcgcagccagacttcattatcgacgattctgatctctctgccggggagcggcgcgcccacatcatcagaaccatcggcctccttggcgcatactgtagacgcgaactccgtgagcccatacccgcaccagcagcgaatcccttgtttgctggcctggtcggtgagttcaaccggaatcaccgcgccgccgagcaaaacggctttcagcgtcaccgccgcccgattcgccagcagccgccacagctgcgtcggcaccagcgaagcatgagtacaccctgccagcatctgctccagcggttgcttatcgcgtaccgtcatgcgcgccccggcgaagagccaacgccacataataccctgcccggatacatgaaacagcggcagcgatagcagccagtcatcctgagggccaaacggcattagcgaaagcaccccctgcgcgctggcaagatgcgcctggcacgtatgtacagccgcttttggcaatcctgtggaacccgatgtcagcgtcatggaaaccagacgctgcggttgccagtccacagcatacgccgctgtgctcttttgtatctgcaacgcggttaatccggaaaacgcgttttcgccttccagtgtcagcgcaaaacgcagcgttaacttcggcaccagcgcctccagcaacgtctggggcaactgcggattgacgggcagaacccgcgcgccgcactgcatcagcgcaagccatgccaacagagtgcgcggctgattcccggcgcgcagcaggacaccgtcgccctcgcgtacgccctgcgcggcaaacccgcccgccagcgcatcaatacgctcacagagggcgcgccagcttagcacttcatcgttcaggcgcagagcgggcgcctggctgcgaacctgacgccagtggcgccacggccaatccgtgaatgtcataacagtcgttccagctcatcacgcttcagacaaggcaacgcgctaccgggccaggggcgaacctgttgcgcctgcatcagatgcaaggtatccagtccgggcagcgttcccggcgtcaaccaggcggcaatccgcgccagttgcgtcaggccgaggctggactcgatcgaagagctgatgaccgccgtcagtcccaacgcatgggcggcagcgacttgctcacgcactttatcaagcgatccggtcagcgtaggtttgataaccacagccctgacgccctcttcggcttcaaaggtgaaatccgcttcgcgcagactttcgtcccaggcaatcgcgatgccggtttcacgggcaaaggcgcgggaatcatcccgcgtcttacacggttcttcgagaaaggcgatacgagcgcggtaatccggattaacatactttgcgaactgttgggcttttagcggcgtccaggcgcgattcgcatccagacgcagatgcagatccgggatcgcctccagcagcaaattaaccaccatgccgtcgcgtaccgcttcataaagacccactttgaccttagcgattttctcgccgggcatatcggcaagccgcagcaccaaatcgtcaggatcgccagtgcataacggcgcagcgcgatagtccgccgcctccggcaagacgccagtcagttccgccagcgcgcagcttgcgccaaacgcgaccgaaggcatctccggtaatccctcgctcccctgaagccagtcgttcacccacgtcaggagcgccgtctgcgcctcttcccacgtttcctgactgaagcccggcagcggagagatctctccccatccctcacgctcgccgtcacgcagacaaacatacagcccgtcgcgagtttttaaccgcctgtcgcgcagaaccacccccgcgtccatggggatctgccagcggtatacctgcgcgctacgcattatgggttccgtttgaatttgctgaagtcaggctgacgcttctggttaaaggcgttacggccttcctgcccttcttccgtcatgtagaacagcatggtagcgttgcccgccagctcctgcagcccggcctgaccgtcacaatcggcattcagcgccgctttcaggcaacgcagcgccatcggactgttttgcaacatttcgcggcaccagcgcacggtctctttttccagatccgccagcggaacgacggtgttaaccagccccatgtccagcgcctgttgcgcatcgtactggcggcacaggaaccagatttcacgcgctttcttctgaccaacgatacgcgccatatacgaagcgccccaaccgccgtcaaaggagccgactttcggaccggtctggccgaagatggcgttttccgccgcgatggtcaggtcgcacatcatgtgcagcacatgaccaccgccgatggagtaacccgcgaccatcgcgacaaccggttttggacaggtgcgaatctggcgctggaagtccagcacgttcaggtgatgcacgccggagtcatcctgataaccgccgtaatcgccgcgcaccttctggtcgccgcccgcgcaaaacgctttatcgccttcgccggtcagaataatcacgcccacgttgtcgtcgtaacgggcatccgccagcgcctgaatcatctctttgacggtcaacggacgaaatgcattgcgcacctgcggacgattaatagtgatttttgcaataccgtcggtggatttttcataacgaatgtcggtgtaaccctccgagcagtcgtgccattctaccggtgcgtaaagcattgtttcatcaggatagatcatagtgtgtcctttagtcagagacgcagaatctgagccagactgtctaccacgccagcggggttttcccgatgcgcgttgtgtccggcgttacgaatgacatggcatgtcgccgccacttcctgcgccagggcgcggaatttgctgtcgcgttcgccacataaataataaaacggaaatgccagcgcgttgagcgcctcgcgtaaatccggctggacggcaagcgatgtcgcctccagcatcgcagccagcgtttcgccgttattctggctacgcagcgccgttagcgcctgtctttgctgcgccgtcagcgaggcgaacaccggctgctgataccagtcgtgaaaaacctcagtcaatggttcatgacgaaaacgctctgcccagcgcccgtcggacaatcgtctttcagcgcgcgcctgttcattttgcagccccggatgaccgccttcaaccaccaggccgcacaggcctggtattccctggcaggctgccatcatcgccacccggccgccaagggagtatcccaccaaccaaaactttagtatgttgtaactaattaacgtagcgcgcagtaatctgatgacatcggcaaagccgccgaccggaatagccgcagatccgccatgtcccggtaagtcaatataaagccgcgaacagccgtgaaactgttcgccaaccggctgccattcacggcaatcgccagaaaaaccgtgcaggaaaaccagtgagggcgccccaggctgtccgggcatgtgctgcgcgtgcaacatcatagatggcttacctgagccaaaagttgctgcaacgtctgcgcgccgtccgtatcgtttaccaccagctcaatcaccgttgtcgccggggttcgccacgcgccagccagcgcagactccagctcttcccagttttccgggcgatgatagcgcaggttaaacatggcggccgcatggtcaaaatggacgttttgcggcatcaaataaaagcgctcgcgtttgctttgcggcgtcggcagcagggaaaagatctgcccgccgttattgttgaccacaatcaacacaaacggcgcggatacctgacgtagtaacgccagcgcgttaagatcgtacagcgcggataaatcgccgacgatagccagcgtcgatttggcgctggcgcgctgcacgcctgccgccgtggaaagcaggccgtcaatgccgctcgccccgcgattgctgtataccggatagccagccggcaactgtgacagcgcgtcgatcagacgcaccaccagactattgcccacgaacaattgcccctgctccggcagatagtcgcggatacggtgcgccagctgcgcttcgccaaaggtgtcccgctgcgcgaccacccgttgccacgccagttccgccagacgcgggatctctacacaccacggtttacgtttttccgccggatgtagttccagccagtcggcgattttcgctaccagtctgcgtccacgatggtgcgcagggtccagacgaccttcaatattgtcgattacccaatactcttccggctcgcaggttgcctgccattgcagtaagcgttttccggtaaggctactgccaagctggacgacaatctgcgcctgctgcagttcggtcaccgctttggcgttgccgagccacaggtcggcgcacggcagcggctgcccggtttgcgacaatacgtcgccaattaatggccatcccagagtttgcgcccactgcgccacttttttgccttcttccgcgctcatacgcccggcgacaacgacgccgcgtttttgtcgccagaaaaaccagtcgcgctgtttgtcgctttccagtcgacgcgcttcgcgcagccagggtttttcatcctgccaccagtcgccgagacgctgctgccagaccagaccggtgtcattcatatcgccatacagcggttcggcaaaaggacagttaatgtgcagcgcgcccgcatgaagcatggcgagcgcattgtcgatggtcgacaccagccagcgcgccggaatatcctgcgtgggacgcggcaacgacagagtttgggaggggtgcgaggcaaacatccccgcctgacggatcgcctggttggcgccgcagtcaatcagctccggcgggcgatcggcggtaagtaaaatgagcttctcgcccgtcagccccgcctcaatcagcgccggatagaggttcgccacggcggtacctgaagtgacaataacggcaaccggctgttggctgactttcgccagccctaacgccagatgaccaagcccacgctcatcaaagtgcgtatggtgaataaaagcaggattctctgccgccgccaacgtgagcggcgtggaacgggaaccaggggcgatacaaacatgcctgacgccatgacgggttaaggcttccaggatgaccgccgcccagcgccggttaaatgcacttactgacatgagtttgtccggtatcaatcattgggactaagtataaagagctgcaaaaatggattattgatatgggtcgggaatatgtgactcattacgcatccatctgcaataaggtacgtaacccggccgctttattatctatttcctgccattcctgttccggatcggagccgcggacgattcccgcgccggcatacaatcgcaccacattggccgtcactttggctgaacgtaacgtcacgcaaaactcactttgccgcgtggagagatagcctgccgacccggcataccattcacgttcgaacggctcatgttgttctataaaacaacgcgcgggttcacgagggatcccggcgaccgctgcggtaggctgtaactggtgcaggcagagcgtgtcgtccgcctgattaagcgccgtccagatacagcggcgcaaatgctgaaccttgcgcagtctgagcacctgcggcggcagcacatccagcgagtgggtgcagttttgcagtcgctggcagatgtcttcgacaaccagcatattttctcgctggtttttatcgtctttcattaaccattcgccaagctgccaggctttatggttatccggatggttcgccaccgtcccagccagcgcttcggtacgcagcgccgtttcacgccgccgccagagccgctccggcgatgatcccagaaaggcggtatcggcggaaaaggccataaaaaagtggtagcagttgagatttaaacgacgactggacgccatcatcgcggcggcattgaccggacgggagaattgtaagtcggtggcccgcgccagcacaactttatcaaacgcctcttgcgcaatggtgtgggtggcctgctgaatcagcttcacccaaccgtctttgtccggccagtgttgttcgctcgtgagcgaaaggcgtagcgccggaacaggcttaatgccgaccagagaagcgagaaacgctttcgcctggcgcgcatcatcgcgtagcgaaacgtcactgtgcagatgtaagcgtaaggtcgccgtaccaccgctacgtcgccactccagccgcggcagcaataagtagccctctttcggctcgaacgcattcagcccccaaatacgcaggtcaggctgcgcgtgctgacgtaaaaaccgttgcgccagatcgagcgatgaaaatacggtgatggccccgagaacggcagcttcttcgtcgccattgcgctgttgccagtagaattgcggaaaggatgactggctggccagccagctcaatgcatcgaaggcatcgtttaaagggaaaggcgcatcgaaaacgcaaagccctggcgtcgccggtatctcttgcgatagctgacgcgtcagattttccagcgcagtagtaatagaatgcacgcggaccctccctgttaaaaaccccacattatacggggtactgccctaaaaaagcagtacctcatttagggagggttgcaattctgttcagtggggggatttagcgccgcgccagcagcagtccaagcaccagtcctaccgccgcgcctacgccaataccctgccagggtttttcatgaacgtagtcatccgctttataaacggcctgctttgcccggtaataatagctatccgacgcatggcttacgcggtttttcacctcttccagcgcttgttccgcgcgggctttcagctcaatgtatttttgatcggcgggatcgcctgaggaacgtaaaacctcttccagcgtttcgctgagcaaagtcagatcatcatcaacacgtgattcaccaaattgatatgacattctcattctccgttgtgttaacacctgctcctaactatagtcaacggtttcggtttatgcctgatgaacctcccgcgccattccccggtgcggaatgccgtcttcgtcataaacatcggtgacgggaataaaaccaaaccgcgcataaaaaggttgcagatgcgcctgcgctcccagatatagcggcttatccggccagtgccgcccacaagattccagcgttttcgccattaattgctggcccagtttcgcccctcgccaggcatcgctgacgatcacccggccaatgacaaccgggtctgattcgttatcgcttttcagaatcctcgcatacgccaccagctcatcctgatgccagcccagaatatgccgattgtcgccgactaaatcatcgccatccacatccaggtaaggacagcgctgttctaccacaaagaccgcgcagcgcaatttgagtaacgcgtaaagttgaggaacggtaagttcactatggtggagatcctgccagtcaatcatgatgcgctcctgtgttgtggtaatcttgggttaaacgataaccaaacgtgtatggacaagatggaattaatttttttaggtacgtccgcaggcgttcccacgcgctcacgcaatgtaacggcaattttattacatctgcaacatccaacgcagccgggagtatggctttttgattgcggcgaagggacacagcatcaaatgcttaataccgcgtttcatcccggtaagcttgagcgcatttttatcagccatcttcacggcgatcatctgtttggcctgccgggtctgctatgcagccggtcgatggcggggaacccccatccgctaaccgtatacgggcctcaaggcgtgcgtgagtttattgcaaccacactgcgtcttagcggttcatggaccgattttccgttgcaaattgaagaagttagcgcaggcgatattcttgacgacggtctgcgtaaagtgaccgcattcaggctggagcatccactggagtgctacggatatcgcgttgttgaacatgacaagcctggcgcgctgaatgccagggcgttaaaagccgcaggcgttacgcccggcccgctgtttcaggcgttgaaggcaggaaaaaccgtcacacttgccgatggaaggcagatcaatggcgccgactaccttgctcccgccgtggccgggaaatcagtggcgattttcggcgataccgcgccctgcgaggccgccctcgcgctggcgcaaggcgtggatgtgatggtccatgaaaccacgctggatgcgtcaatggaggagaaagccaacgctcgcggacacagctccacccgtcaaaccgcgacgctggcgcgggaagctgccgtcggtcggctgatcatgacccatattagctcacgctatgacgataaaggctgtcagcgcttactggcggaatgccgcgctattttcccggcgacggagctggcttacgatttttctgttttcccggtttagcgctccattttttgtcctcattgccgataacactaaaaaaggcaggctttcataatgaggttaggatggacaattttcagaaagatattgatgacagggccaatttaaccctgtccaaccgttttgaactgctgttattccgtcttggtacatcgctgcatgaacagaagtcagagctgttcggcatcaatgtatttaagctgcgcgaaatcgtaccaatgcccgcctttacgcgcccggcaggcatgaaagcgccgctattgggcatggtcaatattcgggatcaggtcattccagtgattgatttgccagcggtagcgggctgcaagccggaaaccgggctgaatattttgctgatcaccgaatatgcgcgcagcgtacaggcatttgccgtcgagtcggtggaaaatattatgcgtcttgactggcaacaggtgcataccgccgagaaagccgtcaacggtcgctacatcaccagtattgcctgcctggatgataacaaagaaaccaacaacctggcgctggtgctcgacgttgagcagatcctttatgatattgtcccctccagccacgacctgcgcgccaccaatctgaagaccaataaattttatattacccctggcgcggtagccattgtggcggaagactccaaagtcgcccgcgcgatgctggaaaaagggctgaacgcgatgggaattccgcaccagatgcatgtgaccggcaaggatgcatgggagagaatccagcaactggcgcaggaagcggaggccgaaggtaagccaattagcgagaaaatcgcgctggtcctgacagatcttgagatgccggagatggatggctttacgttaacgcgtaaaattaaaaccgatgaacggctgaaaaagatcccggtcgttattcactcttccctttccggcagcgccaacgaagatcatatacgtaaggtgaaggccgacggctacgtggccaagtttgagattaacgaactctcttcggtcattcaggaagtgctggagcgcgcagcaacaaacagccagggaccactgatcagccgcaaaagcgcctgacgtaacaggggatgcctacagtacaggcatcccctgacgcttagtgagacaagccttccgccagttttaccagtttaataaactccgcgcgatagccttgtctatcttccccgcgcgcctgttcaccccatttaataatttgcggccaggtcgtatctgccagcgtttctgagccacgcagtttttgcccgaaagccgctaccgccgcgcggaaacgaaaatcttcagaggcgtcagcaaagatcggcatttttcccataacgaccgggaactcggctaatgtactttcgctgccctgcggcgctttccagcgcaatttgatccacgccagctcgcttgattttgttggctttgaggcggctttgtcctgagcgtagcgcagtttatccaccgaggctttctgcccgttaagcgtcagttcaaagaatagcgtgacgtgtttacccgcgccgatatcaccggcatcaaccttatcgttattgaaatcctcgtcgcgcagttggcgtttttcataaccaatctgccggtactcagtcacccactgcggattaaattcgatttgcgattttacatctttggcaacggtgaccagcgtttgatgcatctcatccttgaggactttttgcgcctcggagagggagtcgatgtagctgtaattgccgttacccacatcagcaatcctcaccatcatggcttcgttgaaattgtcatcgccgacgcccagcgtagataaggtaatacctttctcacgctctttttttaccagcgcttcgatgtctttgggatcggtaataccgaggttaaaatcaccgtcggtggtcaacaaaatgcggttaacgccgcctttgataaaccctttttcggcctgctcgtaggctagccgtaatcccgcttcaccaccggtactcccgtaagcatccagattatcaattgccgctttaatcgcggttgtgttatttcccgctgtagacgccaacgcgacgtgagtgccgcccgcgtaggtcacaatcgtgatgttatcctgcgcacgcagatcgttcaccagcagttttagcgccgactggatcagcggcaggcgttccgctggctgcatagaaccagaagtatcaatgagaaaaaccaggttggcaggtggcagatccctgacctgcatgtcccgggcctgaacatcaacttttaatagcgtacgctgcgcgttccacggcgagggagccagttcgtatttaaccgcaaatggcatcggtatacaggccgcaatgggtttagtgttatcctgcttatccgcaacgggctgaggcgcgggaaaatagttgagcatctcttctacccgcacggcttccggcggcggcagttgtccctgattcagaaagcgccgcacgttagcgtagctgccagtgtctacatccagactaaacgtggcgagcggcgcctgacttacctgtttaatcggattttcatcgtagtgttcgtaacgcgcggtccccattacattaccgccttgtgcagcgaacgcttttgatgccgcggcacgtgtccgcatttcatattgcggtgcttcggctgttgccagagatgccgctttggcatctgccagggctttggcttcagtattcgctttatattcggctgcttttttcgcagcctgttgggcggcctcggcttgtcttttctggacagtgtcatccccggcctgagcgctattttctttctggatagcctgctcctgttttaactcagccggattatttccctgtgggtcggagggctccggcccacagcccgagagaacaaccccacccaacaacagcattaatgtttttccattaagcatacaaattccttttcaattatattcgggtaattttctgcagatgtcctgcattatattccgctttacttttattatcagcatgacgaaagtagaaaataattttacctgcgttaatagccaccaataataaaaaagataattatatttttgaggtaaataatatttacgtttaagatgaacggcttaatcagttgctggcgttcgacccacagattctgcgtgaagaacactatttacaggtgaccgatttaccaaaagtgaatatataagatgggggactatctgcactgtgccctcgccgatacttccttttacaacccaccaaacagcaatctattaagccgtgccgacactcacgttattgatggaaagatattatatgccgccgtcacatgaaataatgaagtgagcgcgatcggacgccttgaaaaacgctgacagaaatacgcttcagatcaaatttttcccattgaagtcgatgagatagacatttatccgggaaacgggtcacgaaaacagttgggagagttgttccactgcctgatgcaagaaatggacaaactgctgagtttttatcagcgatgcctgagaaatgacagtcacgttataatttttatagcggagtaatgggccatatgtttatcacttcgacaattattgtgaattacccatatgaaaccgctggcgcttacggaaccgcccaacatccggctctgcgttcatcggaaaagtgttgggtttcggctacgcctcacccaacgagtctatggtctctatgcgtcacaggttttcataagttggatgcaatccaacatttagaggctcaggtattgctcatcagcctcaaccgccgataaatcggcggttattgacatcatcaacgcggcattacatcagcggcatcgccagttgcacaaggctaatcagcggctgcggccagacgcccagtaccaacaccagcaacgcggagatcagcaccacgataccgcctgcgctgtactgccagtttgtcggcgcgtcgcgtcccggttgctgcggcgcgtgcaggtagagactcaccgcaacgcgcaggtagtagtacaaaccaatcgcggaacccaccaccacggcggcgaccagccaccacaggctggcctgaacgccgaccgccagcacgtagaatttgccgataaagcccagcgtcattgggatacctgccagcgacagcatcatcaccgtcatcaccgcggcaagaaccggacggtgccagaacagaccacggtaagagtacagggagtcggcatccgggccgcggaacgggctggacatcaggctgaccacgccaaacgcgccgaggctgctgaacagataaccggccagataaacgcctaccgcttccatcgacatctcgccgctctgcagggcaatcagcgccaccagcagatagccgaggtgagagatagaagagtaaccgagcagacgtttgatgttggtctggctcagcgccatcaggttaccgaagatgatagaggcaaaggcgataatgcccagcaccacgcgtaccgcttcgctgtcgcctaccggcgcatacaggaacagacgcatcaccacgccgaagatagcgattttgctcgccgtcgccaggaaggtggaaaccggcgcaggcgcgccctggtaaacgtctggcgtccacaggtggaacggcaccagagagagtttaaagcccagaccgacaatcatcaggccaaagcccgccagcagcaacggctcgtgcagcataccatcgccgaggctcttaccgagcgcttcgaaagacaggttgccggactgcgcgtacaccaacgccatcccgaacagcaggaaagacgaggcggcggcggagaggatggtgtatttgatactggcttccagcgagcgtttctggcggaaagcataaccaatcaggccgaacagcggcagtgagatcagttcaataccgaggaacagcgccgccagatggttggcgttcgccagcagaattccgcccaggctggcgattaacaccagcaggtagaactcttcctggttatcgttatagccttcaagccacgggtaggcaaaggtgcaggtggcgaggctcgccagcagcaccagcccggtgtagagcatcgcaaagccgtcaacgcgcattagcggcgtgacgtccattgccccagcctggccgacaaaccaaagcgaaaccagagcagcgttaagcccaatgaccgacagcgtggcattgaggaaatgattgcgtcgccacgcaatggagagcatcacaaccaccaccgtcaagccgacgatcagcagcggtagcagcgcaatcaggtgttgtggagttattgtcatggcgatttacggccttgtagtagtaacagaattaacaaaccactgctggatgttgctcatcgcagaatgcgaggtatccagaatcggctgcggatagaagccaagcagtaccagaagcaccaccagcaacagaatgataaacagctcgcgcagcgacatccctggcagttcctggctggcaatctggctcttcgctttaccaaagtaagcgcgatgcagcatcgccagcgagtatacagaggcgaataccaacccaaaggtggagatcacggtaatcatcggcaccacctggtagctgccgaacagaatcataaattcgccgacaaagttaccggtgcccggcataccgagcgtcgccaccgcaaagaacatggacagcgcaggcaaccacttcatcttgccccacaggccgcccatcatacgcatgtcacgcgtatgcagacgttcgtacaactggccgcacagaatgaacagaccggctgcggacaaaccgtgtgcaatcatctgaatcaccgcgccctggtacgccagctgactgccggtgtagatagcgatcagcacgaagcccatgtgggaaacggaggtataggcaatcaggcgcttgatgtcgtattgggtaaaggccatccacgcgccgtagaaaatgccgataacgcccagccacatggcgataggcgcaaactccgccgacgcgttcgggaacaatggcagggagaaacgcagcagaccgtaagcggcggttttcagcaagataccggccaggtcgacggaaccggcggtcggcgcctgggagtgcgcatccggcagccagccatgcagcggaaccaccggcattttcaccgcgaaggcgatgaagaagcccagcatcagcagatattccacaccgtgggacatcggcgtattcagcagctcttcatagttgaaggtccacacgccggtcgcgttgtagtgcacaaagaccagcgccaggatggcaatcagcatcaccagaccactcgcctgggtgtagatgaagaacttggtcgccgccgtgatacgcgttttcccgtcagaagctttgtggccccacagcgctatcaggaagtacatcggcaccagcatcatttcccagaagaagaagaacaggaacatgtcgatggccaggaacacgccgataacgccgcctaagatccacatcaggttcaggtggaagaagccctgatatttttcgatttctcgccaggagcaaagcaccgccagaacgccgagcaggccggtcagcaccaccattagcagcgacagtccgtcgagcgccagatggatagagatgccaaaacgcgggatccacggcagaacaaattcagattgccactgtggaataccggcggattgcgtcagtgagtagccgccctgcaaccacaattgcagaccgagcgccagcgtcagccccatggtaatcagcgctatccagcgcggcaccttcacgccaaagcgttcggtctgccagcacagaaagccgccgataaaggggattaatatcaaccagggtaataacatagctaagtatgtcccttatatttactcctgctcaggctatctcactcgtcagcccaaatcctgccagtgctcacacaaaacgcagcgcgttttgaacgtccgtaaggacggccccgtaggggtgagcttcgcgaatcatcctcacgtacttcagtacgctccggttgctgtgcgctggcggtatccggtctgacttcgccgatgacgcctgtacttcaggaacagattttcaacgaattctaaaaattatttttgggtttgtaggccggataagcactgcgccatccggcagtcgttcatccagccaacaaactcaacgcagtaccatcaacagcgccagcactacaaccgcgccgatgctcatggatgccacataccagcgcaaataaccgttctcgctcagtaccaggcctttgcctgcaaaacgggaaaggatagccggaatgttcatcaacgcattaagcgggtcgcgcttcagcagccaggcgataccgaggaatggcttgacgaatgctttgtcgtacagccagtcaaagccccaggcgttataccaccaggtgcccagcagacggcccggcgcgctgttggcgatcgacgtcaccagcgtacgtttacccagccacagccatgcggcaatcaggatgccggcaatcgccactacgccagaggtaatttccagggtcaacacacgaccatgcgccagttcagttgtctgcggcagccccccctgcagaggcggcacaatcagcgcgccaacaaaggtagacagaatcatcaggacaatcagcggcagatggtgggtaatccccttccctgcatgagcatgaatttgttctttaccgtggaatacgatgaaaatcatccggaaggtgtacaaggaggtcatgaacgcgccgaccagacctgccaccatcagattgatatgaccgttcgccatcgcgccagccaggatctcatccttactgaagaagcccgcagtgaccagcggcagcgccgacagcgccgcgccgcccaccaggaagcaggcatacaccagcggaatagacttacgcagaccgcccatcttaaagatgttctgttcgtgatggcaggccagaatgacggaaccggacgccaggaacagcagcgctttgaagaacgcatgggtcatcagatggaaaatcgccgcatcccacgcctgcacgcccagcgccaggaacatgtagccaatctggctcatggtggaataggccagcacgcgtttgatgtcggtctgcaccagcgcggcgaaacccgccatggccagcgtaatcgccccgataatacccaccagatgcagaatttccggcgtcatcaggaacaggccatgcgtgcgtgcaatcaggtagacaccggcggtaaccatcgtcgcggcgtggatcaacgcggagaccggcgtcgggccggccatcgcgtcggcaagccaggtctgcaacggtagctgcgcagatttaccgaccgcgccgcccagcagcatcagcgtcgcccacatcagcatgttgttgccgtcagcaaagtgcgctggcgccagctcgaccatttcgcggaagttcagcgtgcccagttcgttgtagagaatgaacagcgcgaaggcgaggaacacgtcaccgacacgggtcaccacgaaggctttcattgccgctgcgccattcttcggatcgctgtaatagaagccgatcaacagataagagcacaggcccacgccttcccagccgaggtacatcaacagcaggttatcggacagcaccagaacaaccatgctggcgataaacaggttggtataagcgaagaagcgggagtagccctcttccccacgcatgtaccaggacgcgaacatgtggatcaggaagccgacgccggtgaccacagagagcatagtcagcgacaggccgtccagcaccaggttaaaaccgatgttgaagttaccgaccgacatccacgtccacagcggctggctgaacgcctgtttgccgttggcgaagaaatccatcccgacaaacgctgtcaccaacgccgccagaccaacggagcccacgccaatagtcgcggagagattttccgaccagcgtccgcgagagaacgccagcagtacaaagccaatcaatggcagaataatggttaaggcaagcatgttcatccacgcatctcacttactgaatcgatgttcaggttctggcgacggcgatggagttgcagcaacagcgcaagtccaatactcgcttccgcagccgcaaggctgatggcgagaatgtacatcacctgaccatcggtctggccccagtagctcccggcgaccacaaaggccagcgcggaggcgttaatcatgatttccagcccgatcagcataaacagcagattgcggcggataaccagaccggttaaacccaggacgaataaaatcgcagcgaggatcagtccgtgtgttaaggggatcatgcgcgctcctccgtttttcttttcgcgcggtcatcggcgcggttgcttagcacttcgcccgcacgctcttcacgaccgacgtggaacgccaccaccaggcctgccagcagcagcatagacgccagttcgaccgccagaacataaggcccgaacagcgtaatgcccaccgctttcgcgctaatcggcgtgccgtcgatgccctggtcgttaacgcccagaatggcgtacacaatgaccgccagcataatggccgacaaaaccgccggaccaatccacacctgcggcttcagccactggcgttcctgttcgatttcgctgccgccgaggttgagcatcatcaccacgaacacaaacagcaccatgatggcgcctgcgtagacgataatttccagcgcaccggcaaagtaagcgcccagcgaaaagaacaccccggaaatcgccagtagcgatatcaccagatacaacagcgcgtgtaccggattggtatgggtgatcactcgcagggtcgcgaggatggctatcaggccacagatataaaaagcgaattccattgccctctccttacggtaacaggctcttgacgtcgataggcttggcttcgttctctgcttcgcctttatctttgccgtcgattgccatacccgccatccggtagaagttatattccgggtatttgcccggaccggaaatcagcagatcctctttttcgtacaccagatcctgacgtttgtattcgcccagttcgaagtccggggtcaactgaatcgccgtggtcgggcacgcttcttcgcacaggccgcagaagatgcagcgtgagaagttaatgcggaaaaattccggataccagcggccatctttggtctccgctttttgcagagagatacagcctaccggacaggctaccgcgcacaggttgcaggcaacgcagcgctcttcgccgtccgggtcgcgcgtgagcacgatacggccacggtaacggggcggtaaatagaccggctcttccggatacatccgcgtttcgcgtttggcgaacgcatgcaggccgatcatccagatactgcgtacctgagtgccgaaacctactaataattcttttaaggtcatggtctttgtgtcccttattgcgcctgccacagaatgacagccgccgttaccagcaagttgatgagcgtcagcggcaggcaaactttccagccgaaggacattacctggtcataacgcggacgcggtaacgacgcacgaatcaaaatgaacatcatcatgaagaacgcggttttcagcgcgaaccagacgaatggcggtaagaacgggccatgccagccaccgaagaacagcgttaccatcagcgcggaaacggtgacgataccgatgtactcccccacgaagaacagaccgaatttcataccggaatattcgatgtggtaaccgtccgccagttcctgctcggcttccggctggtcaaacgggtgacggtgacagaccgctacgcccgcgatggcgaaagtaacaaacccaaagaattgcggaatcacgttccacagatgcgcctggttattgacgatatcggtcatattaaatgaaccggcctgcgccaccacgcccatcagggaaagaccaagaaacacttcatagctcaccgtttgggcagacgcgcgcatcgcgcccagcagcgagtatttgttgttgctcgaccaaccggcgaacagcaccgcgtaaaccgccagaccggccatcatcaggaagaacaaaatcccgatgtttaaatcggccaccacccaattagggctaaccggcacaatggcgaaggagagcagcagcgaagtaaatgcgatcatcggcgccagggtaaagatgacgcgatccgagaatttcgggatccagtcttctttaaagaacatcttgatcatatccgcgaccagctggagcgagccgccccagccaacgcggtttggtccataacggttctggaacagacccagcagacgacgttcgccaaagctcatgaaggccccgcaggtgacgaccaccagcagaatcaccaccgctttgagaatgctcagcaggatctcaatcagatccggtgtaatccaactcattgttgcgcctcccgcagatcctcaagacgcgcgccagccagaaccggcgcgatgccaggcatacccatcggcagccctacctgccctgccgctaacccttcagagatttcaaccggcagcgtcaccgtattgccatcgtagctaaaggagacgcgcgtcccggcattgacgcccaacttcgcggcatccgccgggttaagtttgatatacggctgcggcatacggctctggaagaccggagaacgctgagacaattcgtcgctgccaaacaggtggtaatacggcgcaatacgccactgaccgtcctgcgcctggaagcttgccggcacggtagtgaaataatccagaccgccctcagtcgcttcaatcaaacgcacgcccggatcgccgtgacgcagtttgccgcccacttcatcctggaatttgttccacgcctgcggggagttccagcccggcgcccaggcgaacggaatttcagatcgcggggcagtcggttggttattcccttccatcgagaaggcgaacatggtgtctttatcctgcggctgacgtggttcatgcacgctgatattggcgcgcatcgccgtacgaccgctgtaacgatgcggttcgcgcgccagcttctgcccacgaatgcggaaggtcgcatccggcgcggcgtctttaatgccggcaaattgcggcatggcggcaatgaccgcgtcgatcacatggtcaagctgtgtccagtccacttcgcggttttcgacggtgctgtgcagcgaatgcagccagcgccagctttccagcataatcgtcttgttatcgtagtaggccggatcataaacctggaagaagcgctgcgcgcggccttcgttgttgatgaccgtaccatcgctttcggcgaagcttgccacggaaagcaccagatgcgcgttttccataatcgccgtgcgctgatggtcaaccaccatcaccagcggcgctttggcgagcgcggcgttcacgcgcgtagcgcttgcatgacggtggagatcgttttccagcaccaccaccgcgtccgcgctgccggtttccagctcgcccaacgcatcgtcaagcgaaccgcctcccatcatacccagccccatgctgttcacggagcgggcaatcatagtaataccgacgtcggcgccacggcctttcagcgctttcgccacgttggcggccgcctgaatcacctcactgctaccggcgttagtgccggagataatcagcggttttttcgcgccggccaacgcctgcacaatgacatcaattttgttttgcaagtcgctgtcgataccgtcaaccgcaggcgctgtattgtccagcgcatgggcaatcgcaaagcccaggcgcgcctgatcttccaccggcgcgcgataggtccaggcggcgatatcatccagacgggtgtcgtccacgttggtcacgaacagcggatgtttggcacgctggccgatgttaaggatggccgcaatctgccagtcggccactttctgcgccgccgccatttcacgcgctttacctttcaccgcctgacgtaccgccagcgcaacgcgcgcgccggtctgggtaacgtcttcgcccaagaccagtaccgcgtcataagattcgatttcccgcagcgccggggtgtaaatgccgccttcacgcagcactttcagcgccagttgcagacgttcctgctcgccgcgcgcgataccggtgtagaagttttccgcaccaaccagttcacgcagcgcaaagttgctctcaatgctggcgcgtggcgaaccgataccgatcactttcttcgactggcgcagaatatccgccgcgccctgcatcgcctgctcggcgttgagggtgatgaagtcgtcgccacggcgctgaaccggctgacgcggacggtctttcaggttcacatagccatagccgaaacgaccgcggtcgcagaggaagtagtggttaacggtaccgttgtaacggttttcgatacggcgtaattcgccatagcgctcgcccgggctgatgttacagccgatggaacactgctggcagatgctcggcgcaaactgcatgtcccatttacggttgtaacgctcggagtgcgttttatcggtgaagacgccggtcgggcaaatctcgaccaggttaccggagaattcgctttccagcgtaccgtcttccggacgcccgaagtagacgttgtcatgcgcgccatagacgcccagatcggtgccgtcggcataatctttgtagtaacgcacacaacggtagcaggcgatgcagcggttcatttcgtgagagatgaacggccccagatcctggttgcggtgggtacgtttggtgaaacggtagcgacggaaactgtgacccgtcatcacggtcatatcctgaagatggcagttaccgccctcttcacagaccggacagtcgtgcgggtggttagtcatcagccactccaccacgctttcacggaactgtttcgcttcttcgtcgtcaatagagataaaggtaccgtcggtggctggcgtcatacaggacatcaccaggcgaccacgcgtatcttccgcgttttggtattgcttcaccgcacactggcggcaagcaccgacgcttcccagcgccgggtgccagcaaaaatacggaatatcaaggccgagggacagacatgcctgtagcaggttgtccgcgccgttgacctcgtattctttgccgtctacatgaatcgtagccattagcatgcttccaaattaaaaatcgttaactcaccagcgctctttgagcaggttcggctgaataccattgattaaatgggtattgctgaacggctgcttgatgccagcttcgaattcttcgcggaaatacttaattgcgctttgcagtggctcaaccgcgcccggcgcatgcgcgcagaaggttttacccggtccgaggaaacgacacagttgctcaagtgtctcgatatcccccggctggccttcgccacgctccagcgcgcgcagaattttcacgctccacggcagcccgtcgcggcatggcgtacaccagccgcaggattcgcgggcaaagaactcttccaggttacgcaccagcgacaccatgccgatttcgtggtctaccgccatcgccagcgcggtgcccagacggctgcctgctttaccgatgctttcgaactccatcggcaggtcaagatgcgcctcggtcaggaagtcggttcccgccccgccaggctgccaggctttgaatttcaggccatcgcgcataccgcccgcgtagtcttcgaggatctcgcgcgcggtggtgccgaacggtaattcccacaggcccggattcttcacgcggcctgagaagcccatcagcttggtacccgcatctttgcttttcgagatgttctggtaccactccacgccgttggcgaggattgccgggacgttgcacaacgtttcgacgttattcacacaggtcggtttgccccatacgccggaggtcgccgggaagggcggcttggagcgtgggttcgcgcggcggccttcgagggagttaatcagcgccgtttcttcaccacagatgtaacgccctgccccggtgtggacaaacagttcaaagtcgaacccggtgcccatgatatttttgccaagcagcccggcctcggtggcttcagcaatcgcacggcgcaaatgtacagccgcttcgatatattcgccgcgcaggaagatgtagccgcgatacgctttcagcgcgaacgcggagatcagcatgccttccaccagcaggtgcggcagttgttccatcagcagacggtctttataggtgcccggctccatttcatcggcgttacacagcaggtaacggatgttcatggattcatctttcggcatcaggctccacttcagaccggtggaaaagcccgcgccgccgcgccctttcagaccggcgtcttttacctggctgacgatttcatccggagacaggccggtcagcgccttacgcgcgccttcgtagccgtttttgctacgatattcatccagccagaccggctgtttgtcatcgcgcagacgccaggtcagcggatgggtttcgggagtacggataacgtttttcatttataccgctccagtagttcaggaatggcttccggggtcagatggctgtgagtatcctcatcaatcatcatgttcggccctttatcgcaattccccaggcagcaggtcggcagcagcgtaaagcgaccatcaaaggtcgtctgccccggtttgatgttgagatttttttccagcgcggcctgaatcccctgatagccggtgatatggcacaccacgctgtcgcagtagcgaatcacgtggcgaccgaccggctgacggaaaatctggctgtagaatgtggcgacgccttcgacgtcgctcgccggaatacccagcacatcggcaatagcgtagatcgcgccgtccggcacccagccacgctgcttctgaacgattttcagcgcttcaatggacgccgcacgcgggtcttcgtagtggtgcttctcgtgctctatcgcttcacgctctgccgcactcagctcaaaagcctcggtttgtggttgttgattctcgtgcataattagcggtccacatctgacataacaaaatcgatactacccagatagacaatcaggtcggagaccaggctaccgcggatcgccgagggaatctgctgcaggtgcgcaaagctcggcgtgcgcacgcgggtacggtagctcatagtgctgccgtcgctggtcaggtagtaactgttaatccccttcgtcgcttccaccatctggaaggactcctgcgccggcatcaccgggccccaggagacctgcaggaagtgggtgatcagggtttcgatatgttgcagcgtgcgctctttcggcggcggcgtggtcagcgggtgatccgctttgaacggcccttccggcatgttatcgaggcactgctgaagaatgcgcagactctggcgcagctcttccactttcagcatcacgcgggtatagcagtcggaaacgccgccgcccaccggcacttcaaagtcaaagttttcgtagccagagtatggacgccatttacgtacgtcgaagtcgatcccggtcgcgcgcagccctgcgccggtggtgccccactccagcgcctctttcgcgccgtaagcggcaacgccctgcgaacgccctttcagaatagtgttacgcagcgcggctttctcgtaagaatccagacgcttcggcatccactcaaggaactctcgcagcaggcgatcccaaccgcgcggcaagtcgtgcgcgacgccgccgatacggaaccaggccgggtgcatacggaaaccggtaatggcttccaccaggtcataaattttctgccggtcggtaaaggcaaagaagaccggcgtcatcgcgccgacgtcctgaataaaggtcgagatgtacagcagatgactgttaatgcggaacagttcggagagcatcacgcggatgacgttcacacgatccgggacggtgatccctgccaacttttctaccgccagcacgtacggcatttcattgacgcaaccaccgaggtattcgatacggtcggtatagggaatgtagctatgccaggactgtcgctcgcccattttttcggcgccgcggtggtgatagccgatatccggcacgcagtcgacgatttcttcaccgtcaagttgcaggataatacgaaacgcaccgtgcgcagacgggtggttcgggccgaggttgaggaacataaagtcctcgttgtcagtcccgcgcttcatcccccagtcttccggcttaaaggtcagcgcttccatttccagatcctgcttggctttggtcagctcaaacgggtcgaattcggtcgcgcgcgccggataatctttacgcagcggatggccttcccaggtttgcggcatcatgatgcgcgtcaggtgcgggtggccttcgatatcaataccaaacatctcccaggtctcacgctcgtaccagttggcgttagggaaaagtttagtgaaggtcggcacgcgcaggtcgttttcagacaacgccaccttgagcatgatatcgcgattacgctcaatggaaatcaggtggtagaaaacggaaaaatccgcggcgggtaacccgtcacggtgcgtacgcaggcgttcatccatgccgtgtaagtcaaacagcatgacgtaaggtttcggcagtttctttaagaaatcgccaacctccagtagttgttcacgcttgacccaaacaacggggataccggtgcgggtcgcctgaacggtaaaggcatccggcccaaaacggttgcgcagttcgccgataaccggatcatcaagatgatcgcgggtactccatgcagcgtcttgcgcggttaagtcggtcatattgttcaccattgcaaatggtccgtggtggtcggcagtgcttcgcgctattaaaatagtggttagcgaagtgaagtgctgctgccgacaggcgcaaattaaatctcgtccggggtacgcaggttcgtgacggcaatacgctcgccgcgtttacgttcgcgttctggctgcatattggcgcgatacacgccctgatcgcccaccacccatgagagcggacggcgctctttgccaatcgattcttgcagcagcatcaacgcctgcatatacgcttccggacgcggcggacagccagggatatacacatccaccgggatgaacttatcaacgccctgcactaccgaataaatatcgtacatgccgccggagttggcgcaggcgcccatagaaatgacccattttggctccagcatttggtcatacagacgctgaataaccggggccattttggtaaagcaggtcccggccaccaccatcaggtcagcctgacgtggcgacgcacgcagcacttccgcgccgaaacgggcaacgtcatgcactgcggtaaaagaggtcaccatctctacatagcagcaagaaaggccgaagttgtagggccaaattgagtttttacggccccagttaaccatgtcatgcagtttgcccatgaacacgtttttgttaacttcctgctccagggggtcggttacgatctcctgtttttgcagggggtaacggtcattctcaccgttaggatctatgcgggtgagcgtataatccatcttaatgcctcgcggttagcgttgacgattagcgatactgttcgtttccgggttcatacgctcgcggcgtgaacgcgcgggcgtccagtccaacgcgccaatacgcgccagataaaccagaccagccagtaacacaaaaataaaaattgcagcttccacaaagccaacccagccgctttcgcggatagaagtcgaccatgcgaacagatacagcgcttcaacgtcgaagataacgaagaacatggctaccaggtaaaacttggcagacaggcgtaagcgggcggtgccgaccgagtcgatacctgattcaaacggaacgttcttgtgcctcgcgcgtgcgcgaccgcccaaaaaccaaccgcctaccagcatcaggcagcacaggccaatggcaacgataagaaagatagcgaatgcccagtgatgagcgatgacttcagtggatgttgacatactcattgcttactcatcaaaagtagcgccagttcctctgctctttacggcagatggacgccacatcgattcatggggaggaataaaaaaaaccctacaattactgtagaaaatgataaaaacagctaattgatgtggttttttactcctttctataaccttttgtcaactttaacaaaagttccttcacattaatttacatcaattcatcatcattaacattaagtgccatcctggagaaaatgactcttcgaccaggggggattttatgttgttgaatcgtgtccgttgtgaagcaaaagaaataacacacacctattttgacaggaatttgtgaagatgcctccccctaaatgggagtattttcttgatctgtgacacgcttttgttaattcaccccctaaaacagcaacaatttctctagttttttaacatgcaaattcataaaatggatgttctggttattttttacccacattgaactgcgaatcgctactggctgatttaccgcaacttttacaatttgtgcggttaagcgcgtacagatgggcacaaaaaaagagccactgagcgttttttcatcgccagcggctcttttttacatttacgacttagcgccttttgcctgcgagctactcaaaacccccttccaccatcagcggatcatctccgccctctgcagaaaactggttgtaatgccatgggttttgatagctttccatcgcatggaaaatcaccatcgccagctcgttctggctattgggatcgcggcacaacagatattccgtatccggcaaaggcggtaatccgtctgcggcgcccagcacgcgaaggtcgggactcatcatttcgacaggtcgagccgttacgccaagaccggctttaacggccgcgcgtaccgccggtaatgtagacgccacataggccagccgccagggaatacccgctgcatttagcgtctccagcaccatatcgcggaatggactgggatcgtccagcaggactagtggtacgggctctcccctttgcaaaacatactcagccgcacaataccaatgggtgggcgaggtccgcaaattcagacagtccagcgaatgaggttggttagtcgtcaccaccaaatctacttcctgcgatttaaccatgtccaccatataggcgttgcgttttacccgtacatcaagcgcgagtttcggataaaccgagctgattcggctaagcaaaaaaggcaggatagtatcagctgattcatcagaagcgccgattgttaacactccctgaagattactgaacattaatgatgaacacgcctcatcattaaaacgcaggatttttctggcgtaccccagaagctggataccgtgttcggtcaaaagtttgttacgaccatggcgggcgaacaattcctttcccacgagttgctcaagacgctgcatttgctgactgaccgcagactgagtacgacataccgccgccgccgccgcggcgaaggtgttcagatcggcaacggccacgaacgttctcagcagatcgagatcgaggttaattatcggacgatttgcatttatcataatttttcacttactggcgggtcatatcgggctgacctggttaatgctgtgcattcagaaacaagcaattccatttgtaatgtgcatccttcgcagtaccgcctggttacccaggtaaatgttagaatgtaattgaaaatacgaccaaaacacttctcttacttactgatataataccaaatgcaaccgatctggatatatcaaagagaatgtgtcatacctttaggcgtctacagatttctgctaatgatggacgtgtaaatcttgtaacagcgtcaaatagtttaccgagacgcacagatacaaaaacaatatattgaacaataggttatgtataaaatcgcgtcatgataattagcagacaacgcagactacgcccccgtttcggatcattatcttaacctaaaaccgctatatttataagtattattacgaataatcttaacctgggatatgttatactaatcggaccagaaagatattattacgactttagtaaatgctttttaaatattaaataataattaattaagatttctaccattcattaattatacttaacaatagtttcacaccccccgccgccggaaaggtctaaccttctcattttacctttaatactcagtatttccgaaatagccgacgcgacactaatgatgaatgcttatctctcataaaacagataatttctgacaacataaaaaaccacattacgcgcaatcacatagaataaaacactatacatacaaacaaaaatagaaaatacatctaaccaaatgattttatgaagttttaaacagcacgaaagcgcgttaaaaataaacaaaatcttcttctgttcactcttcaaaactcaccgtcgtgggagtacattgtttcgtgctgacttccacggcagggagtggcaataacagctaaaaggtcaagattcatgtcccccattgaaaaatccagcaaactcgaaaatgtctgttatgacattcgtggccccgttctgaaagaagcgaaacgccttgaggaagaaggtaataaagttcttaaactgaatatcggcaaccccgcccccttcggattcgaagcgccggacgaaattctggtcgatgtcattcgtaatttgccgacggcgcaaggatattgcgactcgaaagggctttattctgcccgtaaagcgattatgcaacattatcaggcccgtggaatgcgcgatgtaaccgtggaagatatctatatcggtaacggcgtttccgagctgatcgttcaggcgatgcaggcgttgcttaacagtggcgatgaaatgctggttcccgcgcccgattatccgttatggacagcggcggtatcgctctccagcggcaaggcggtacattatctttgcgatgaatcttccgactggttcccggaccttgacgatatccgcgccaaaatcaccccacgtacgcgtggtattgtcattattaatccaaacaaccctactggcgccgtctattctaaagaattgttgatggaaattgtcaacattgcgcgcgagcataatctcatcatcttcgccgatgaaatttatgacaagattctctatgacgatgccgagcatcactctatcgccgcactggcacctgatctgctgaccatcacctttaatgggttgtctaaaacctatcgcgtcgccggcttccgccagggctggatggtgctgaacgggccgaaaaaacatgcgaagggctatattgaagggctggagatgttagcctcaatgcgcctgtgcgccaacgtcccggcgcaacatgctattcagaccgcgctcggcggctatcaaagcattagcgaatttattctgccgggcggtcgactgtatgaacagcgtaaccgcgcctgggagttgattaacgatatccccggcgtttcctgcgtaaaaccgcgcggcgcgttgtacatgttccccaggatcgacgctaaacgttttaatattcacgacgaccagaagatggtgctggacttcctgctacaggaaaaggtgctgctggtgcaaggtaccgcctttaactggccgtggccggatcacttccgcattgtgacgctaccgcgtgaagatgacctggagatggccatcaaccgttttgggcgtttcctctcaggttaccatcaataatcttaaattcaggctacttcggtagcctgaattgcatcttcatcaccctccccgcacaatgaagtctgccgcagtgaaaacaaaaggtaatctatgaagcagagccattttttcgcccatctctcccgcatgaagttgattaaccgctggccgctgatgcgtaacgtgcgtacggaaaacgtctccgaacatagtctgcaggtggcgatggtcgcccatgcgttggcggcgataaaaaaccgtaaatttggcggtcagctcaatgctgaacgcatcgcgcttctggcgatgtatcatgatgcctcggaagtactgaccggcgatctgccgacgccggtaaaatattttaattcccagatagcccaggaatataaagcgatcgaaaaaatcgcccagcaaaagctggttgatatggcgccggatgaattacgcgatattttcgcaccgcttattgatgagaatgcctggagcgaagaagaacaggcaatcgtaaaacaggccgatgcgctttgcgcctacctgaaatgcctggaggagctctcagcgggaaacaatgagtttggactggcaaaaacgcggctggaaaaaacgctggaattacgtcgcagccaggagatggactattttatggcggtgttcgtaccaagtttccatctctctcttgacgagataagccaggattcaccgctttaaacggttttgccggatggcgacgtcaacgtcttatccggcctggacgtagcgtgatatccgtaggcctgataagcgtagcgccatcaggccttttcctgtctggggttaaaacggaaacaacatcggaatcatcacaatacaaaccgccatcacaataagcgtgaacggcacgccaagcttcacaaaatcgctaaagctatagtttcccggccccagaaccagagtattgaccggcgatgaaaccggcgtcataaaggcggcggatgccgccatcgccaccgccatcgcaaacggatagggcgacacccccatcgatttcgccgccgccagcgcaatcggcgccatcagcaccgccgttgccgtgttagaaatgaacagtcctatgacggcgcacagcacgaacaggcatcccagcatcatatacggcccatagccgccgccgatatccattaatccttgcacgaccagagagacgccgccggttttttgcaacgccagcgcaaacggcatcatacccacaatcaagataatactcggccagtggatcgctttatacgcgctttcagcatcaatacagcgaaatttccccatcagcaggcaggcgataatcgccgcgatcgggttgggaatttcatcggtcaacatcagcgccaccatcagtaccaggcagaaaatggcgtgcggcgcctggctgtgcgcaggagaggcttcgctgacctcgaccggcatattcagcaccacaaagtcgcggcctttttgccccagcaggctgattaacttccagttccccacgaccagaatgatatcgcccatcaataacggttcatcggccagcgacccttccagcgcgacgccgtcgcgtttcaggccgaccatattcagcccgtaacgtgtacggaaggcgatttcacgcaccgacttgcctatcagttcagactccggaataagcgaaatttccgccatgccaacatccaacgcctgatcggaaaaatattctccacgcaataccatcggttccagcagttgctcggcgcagaactctctgaggtcaacctccgccgccgacatatcaatcagcagaacgtcgcgagcgcgaaactccgatacgccgttcacattgacgataacccgccgaaagcgccgccagcgttcaacgccgatgacattggcgccgtaacgttcgcgcagtttaaggtcgtccagccgctgtcccaccattggcgaaccggggcgaatcgccagacggcgagcgcgccccgtcagacggtactcgcggataagatcgcggaaagtgcgccgcttaccggcctgttgtccgggcgcatcgccttttagcatgaagcgcatcaccagcatataaacaatgccgagcgccaacaccactatccccagcggcgtcacgctaaaaaagttgaacccgtgcaggccttcacgcagcagttcactgttaaccaccaggttcggcggcgtcgccaccagcgtcatcattccgctgataagcccggcaaaactcagcggcatcatcaggcgcgaaggcgaggtctgcatatgcatagaaacgctaagaacaacggggataaagatcgccaccacgccggttgaactcatgaaagcgccaagtccggcgacggtgatcatcagtaaaaccagcattttgatttcactgctgcccgccattttaaccagccaggtaccgaccaccgtcgcaacgccggtgcgcacgaggccgtcgccaataataaataaggcggcgataagaatgacattcggatcgctaaagccggagaaggcttccggaagggtcaaggtaccgctaaggacaaaagcaacaatgacgaataaagccaccgcatccatacgtactttgcccgtcgcaaacaacacgacggcaatcgccagtaaagagagaacccaaatcaattcaccgttcacaacatatccttgtcagatgagaagataacgcgattctgccataaatatgccccgccaaagcggggcgatatcatgatcacgtctttcttaacaccaccacatcgccgtttggttgtttagcgaccgataattgcgtcaggctatccaacgcaaaatcaacatccgccagacgcggcgtgtcggccggcgcattgaccgcaatgacgtggcagcccgcagccagcccggacagcacgccagccggggcatcttctactacgacgcactcctgaggggccaggccaagcagttgtgcgcccagcaaatacgcatccggctccggtttgccgcgtttgactcgttcggcggtgacaaacacctctggcgctggaaggcccgcgacctgatggcgcgcacgcgcgaccggcattgaaccggaggtgacgatagcccacggaatgcccgctttattcaggtgattgagtaaatcgactgcccccggcaacgcggtgatccctgcggtttcagtggcttctatttgctccaggcgcgtaaactcagcggcaatttccgcctccgatttacccgccataaaatgccgcaacgaggtgatcgcctgtttgccatgaataaagcccagcacctcatcatgagcaaggttaaaacgatcggcccagctacaccacgcgcgttcgacggcaggtaatgagtcaaccaacgttccatccagatcaaacagaaaacctttacactgcacgcgagcctcctcaggcattaatgatttgattgatttcattcgcgctcaggtggtactgacgcgggcaggcatgccagacattcaacatccgctggtatttttcccacatcggcgtctgggcattaaagccgtgtgtcccggcgtcaaagtgagtgtagcgtccttctatattcaccataaaacggacatagccgaggtagcgcgcttccgtcgcggcgtcaaaccccaggaaggtgacgcgacgttcgtcgatggcttgcgtatctttgaggttggtccaggagacgtgcagcgcatggtacatctccataatatcgatgatggtacggcaggtctcttccgtcagctcgccaaactcgcgatccagctcgcgcatctgcaggccgtagccgcgttcaataattgtttgtaagcgacggtaacgctcggcgttggtgggatcgagcatcgtcatcattttgtactggttagacaaaatcagacgttgcgcgttggtcatttccattttgaactcctgtatcacgctatggcgatgaaaaaaagaaggcattggtatgccttcttttatatgcgtaatccggggtcaattacaaatcatccaggaaagttttatccagttgtttgaaggcgcgcttaagcgtgtcagctaatgcctggtaatccggctttccttctaccggcgccagcgcttgtccagcctcctgcaatttaccgcgaacttcgtaaaaccagttaaggattgaaggcggcaacggcgtcacggaacgtttccctaaccaccataatccctgcataggcaagctcagggcgaacagggcggtcgccacggccggacctaactgaccgcccagcgctatctgccagcataatgtaaagacggcgacaggcggcataaatcgtatggcatagcgcgtcatacgaatgacgcggttttcgacgaaaacgggcgccagccgcttttccatcggccacgtcttcgcgtagtgctgcccccggcgaaataagctaaaaaaatttacggagcgattatccggtgtcgacatggcctacctcaacttcacatataaaatttaaaaaatttgtgcaaaacaacaactgcgagggacaacgttcaaaacattttgtcttcgatacccactatcaggtatcctgtgtcggcctgtcaaaggccggtagtttaaaatcattgagtcgtcaatattacacatagtatgccattggctgaaaaatacgcaaaatggcatagactcaaaggtatttcttccatcatgcccaaaaaaactcctgcgcatgatgttaatcataaatgtcagggctatcatgcgctacgctctatggctcactgacgtttttttagccacgtatcataaataggtacttccatgtcgagtaagttagtactggttctgaactgcggtagttcttcactgaaatttgcaattattgatgcagttaatggtgatgaatacctttctggtttagccgaatgtttccatctgccagaagcacgcatcaaatggaaaatggacggcagtaaacaagaagcggctttaggtgcaggcgccgctcacagtgaagcgctgaactttatcgttaacactattctggcacaaaaaccagaactgtctgcgcagttaactgcaattggtcaccgtatcgtacacggcggcgagaagtataccagttccgtagtcattgatgagtccgtcattcagggcatcaaagattccgcctctttcgcaccgctgcataacccggctcacctgattggtatcgccgaagcgctgaaatctttcccgcagctgaaagataaaaacgttgcagtattcgacaccgccttccatcagaccatgccggaagaatcttacctgtatgccctgccgtacagcctgtataaagaacacggcgttcgtcgctatggcgcacacggcaccagccacttctatgtaactcaggaagcggcaaaaatgctgaacaagccggtagaagaactgaacattatcacctgccacttgggcaacggcggttctgtttccgctatccgtaacggtaaatgcgtggatacctctatgggtctgaccccgctggaaggcctggtcatgggtacccgttccggcgatatcgaccctgcgattatcttccacctgcacgacactctgggtatgagcgtggatcagatcaacaaaatgctgaccaaagagtccggtctgctgggtctgactgaagtgaccagcgactgccgttatgttgaagacaactacgccaccaaagaagacgcaaaacgtgcgatggacgtttactgccaccgcctggcgaagtacatcggttcttacaccgctctgatggacggtcgtctggatgcagtcgtgttcaccggcggtatcggtgaaaacgccgcgatggttcgcgaactgtctctgggtaaactgggcgtgctgggctttgaagtcgaccacgaacgtaacctggcggcccgcttcggcaaatctggtttcatcaacaaagaaggtacccgtccggcggtggtgatcccaaccaacgaagaactggttatcgcgcaggacgcgagccgtctgactgcctgatttcacaccgccagcctcgctggcggtgctgttttgtaacccgtccccaaaagacggtaacgaaagaggataaaccgtgtcccgtattattatgctgatccctaccggaaccagcgtcggcctgaccagcgtcagcctcggcgtcatccgtgctatggaacgcaaaggcgttcgtctgagcgtctttaagcctatcgcccagcctcgcgctggcggcgatgcgcctgaccagaccaccactatcgttcgcgcgaactctaccctgccggcggctgaaccgctgaagatgagccacgttgaatctctgctctccagcaaccagaaagacgtgctgatggaagagatcatcgcgaactaccatgcgaataccaaagacgcggaggtggtgctggttgaaggtctggttccgacccgtaaacatcagttcgctcagtctctgaactatgaaatcgcgaaaacgctgaatgcggaaatcgtttttgtcatgtctcagggtaccgacacgccagaacagctgaacgagcgtatcgaactgacgcgcagcagcttcggcggcgcgaaaaacaccaacatcaccggcgttatcatcaacaaactgaatgcaccggttgatgaacaaggtcgtactcgcccggatctgtcggagatttttgacgactcttccaaagcgcaggtgatcaaaatcgatcctgctaaactgcaggaatccagcccgctgccggttctgggcgcggtgccgtggagcttcgacctgattgcgacccgcgctatcgatatggcgcgtcacctgaacgccaccatcattaacgaaggcgatatcaaaacccgccgagttaaatccgtcactttctgcgcgcgtagtattccgcatatgctggaacatttccgcgcaggctcgttgttagtgacctccgctgaccgtccggacgtactggtcgcagcttgcctggccgcgatgaacggcgtagaaatcggcgccctgttgctgaccggcggctatgaaatggacgcacgcatttctaaactgtgcgaacgcgcattcgccaccggtctgccggtctttatggtgaacaccaacacctggcagacttcgctgagcctgcaaagcttcaatctggaagtcccggttgatgaccatgagcgcatcgagaaagttcaggaatacgtcgcgaactacgttaacgctgagtggatcgagtcgctgaccgccacttccgagcgtagccgtcgtctctctccgccggcgttccgctaccaactgaccgagctggcgcgtaaagccggtaaacgcgtagtgctgccggaaggcgacgaaccgcgtaccgtcaaagcggcggcaatctgcgctgaacgcggcatcgccacttgcgttctgctgggcaacccggatgaaatcaaccgcgtcgcggcatctcagggcgttgagctgggcgcaggtattgaaatcgtcgatccggaagtggtgcgtgaaagctatgtcgctcgcctggttgagctgcgtaagagcaaaggcatgaccgaaccggttgcccgcgagcagctggaagacaacgtggtgctcggcacgctgatgctggagcaagacgaagtcgacggcctggtttccggcgcggttcataccaccgccaacaccatccgtccgccgctgcagcttattaaaacggcgccgggtagctccctggtctcttctgtgttctttatgctactgccggaacaggtttacgtttacggcgactgcgcaatcaacccagacccgactgcagagcagctggcagaaatcgcgattcagtctgcggattccgccattgccttcggcatcgaaccgcgtgtggcaatgctctcctactccaccggcacctctggcgcgggcagcgacgtagagaaagtacgtgaagcgacgcgtctggcgcaggaaaaacgtcctgacctgatgatcgacggtccgttgcagtacgacgccgcggtcatggctgacgtagcgaaatccaaagcgccgaactcgccggttgcgggtcgcgctaccgtgttcattttcccggatctgaacaccggtaacaccacctacaaagcggtacagcgttctgccgacctgatctccatcgggccgatgctgcagggtatgcgcaagccggtgaacgacctgtcccgtggcgcactggttgacgatatcgtctataccatcgccctgacggcgatccaggcttcccaacagcagcagtaacagtaaaagctaatgccggatggcggcgtgaacgccttgtccggcctacaggtgagataccgttgtaggccggataagacgcgttagcatcgccatccggcattctgctatttaccctgcaaagcggaattttttgcttaactgcgctgcatcaatgaataactattcccttcttctcatacttagcctctttgctttgcaacagggatagtctgtcatgtctgtcgttacagaatcaaaaacagccagaaaatgggcaatgcccgatacgctggtcatcatcttttttgtcgccattttaaccagtatcgccacctgggtcgtacccgttgggatgtttgatagccaggaagtgcagtatcaggtcgatggtcagacaaaaacccgcaaagtcgtcgacccgcactcttttcgcattgtgaccaatgaggccggggaagcgcagtatcatcgcgtacaatttttcactaccggcgatgaaagaccagggctgatgaattttccgtttgaagggttaacatccggatcgaaattcggcactgccgtcggcatcattatgtttatgttggtgattggcggcgcattcggcatcgtgatgcgtaccggcaccgtggataacggcattctggcgcttattcgccacacgcggggcaacgaagtcctgtttattccggtgctatttgtcctcttttcgttagggggcgccgtatttggcatgggcgaagaggcggtcgcctttgcaattatcatagccccgctgatggtcaggctgggctatgacagcattaccaccgtcctggtgacctatatcgccacccaaattggctttgccagttcgtggatgaaccctttctgcgtagtcgtcgcccaggggattgccggcgtgccggtactttccggctccgggctgcgtattgtggtctggattgtcgccacgctgattgggctggtttttacactggtctacgcctcacgcgtgaaaaagaatccgctgctgtcccgcgtccacgaatccgatcgctatttccgcgaacagcaggatgaagtcgtccagcgccctttcaccttcggtgactggctggtactgctggtcctgaccggcgtaatgatttgggtcgtctggggcgtgattgtccacgcctggtttattccggagatcgccagccagtttttcaccatgggcgtggtgatcggcctcatcggcgttatcttccgcctcaacggtatgacggtcaacgtgatggcgtcctcattcaccgaaggggcgaggatgatgatcgcgcccgccttgctggtgggttttgctaaaggcattctgctgctggtcggcaacggtgaagccggggaacccagcgtgctcaatacgctgcttaacagtatcgcgcatggcatcagcgggcttaataatgctatcgccgcctggtttatgctgctcttccaggcggtatttaatttctttgtcacgtccggttcgggtcaggcggcgttaaccatgccattactggcgccgctcggcgatctggtcggtgttaaccgtcaggtgactgttctggccttccagtttggcgatggcttcagccatattatctatccgacatcagcctcgctgatggccacgctgggcgtgtgccgggtcgattttcgcaactggctgaaagtgggagcgtcgctgctgggactactgtttattatgtccagcgtggtcgtcattggcgcgcagatgatgggatatcattaatccaaaatgccggatgagcatcagcgccatccggcaatatctccatgattaaagcagtgatttcgcggcttctacaatcgcttcggcggtgagtccgtactcttgttgtaagaaatcctgcgttcctacctgcccataacgctctttgacgccaacacggcgcatcggcaccgggcagttttccaccagcacttccgccaccgctgaccccagtccattatggatgctgtggttttcacacgtgacgatacgccgcgttttttccgcgtagtttttcaccaacatgcgatcgataggctttaaggtgaacatatcaatgaccgcggcgctcacgccttcctgctccagttggcgcgccgcctccagcgcctccgccaccataatgccgttggcgataagcgtaatatcatcgccctcgcgcagtacgttgcccttgccaatggtaaaggtagagcctggcgcatagatactcgtcgcctgcttacggatggtacgcagccagtaaaaaccgtccaggtccattagctggcgtaaaatatccgcgaacatcaccgcatccgtcacctccagtactacggagtgcgccagcccgcgaacaatccccatatcttcaaaagacatatgggtgccgccgttatggcacgccgtcactccggcatcggaggcgatcactttgacgttgttacgctgataatccagcgccatgaagagctgatcaaaacagcgacggctggcaaaagcggtaaaggtatgcacaaacggtttacgaccggtcagcgccagccccgccgcagtgccaatcacattcgcctccataataccgcagttaatgacatgctgcgggtagtcacgcgccacgctgtccatcgccattgagctcattaaatcagcctcaagcgcaataattgggcttccggcctcaatctgcccggcgacaaaaccggcgtaaactttgcgcatttcgatatcgtctttaagccctgcgggcgcaagcttaatcatgcatgacctccagttgatgaatggcctcattgagcgtctgcttcatgccatccgtcaggcgtaagtggtgagaattcgttaactgctccaggtatggcaccccctgccctttaatgctgtcaaggatcacaacccgtggccgggcatcagcgggcagcacaggctgaaccaccgccagtagtccggcgatatcatcgcctttgacggtgacgacatcgaaaccaaacgcacggaatttcccttccagatcgaatggattgataatctcctccagctcgccgtcaagctgctgtttattccagtcaatgaaaacggtcagattattcaggcggtggtgggcaataaactgaaacgcctcccagcactgcccttcattgagctcgccatcgccgacaatgcaaaatacccggttgggtcgccgcgccagtttatgcgacaacgccattccgcccgcaatagagatgccctgtcccagtgagccggtcgtggcgtccacgccgcgcgtttttagccgatccggatggctgggaagacgggtgccgttctggttaagcgtattcagctcttcgcgcgggaaatagcctttaatcgccagggtactgtacaacgcggggcccgcatggcctttcgacagtacgaagtaatcgcgttccggccagtccgggtcggcagggtcgattttcatcaccgcgccgtacagaaccgccagagtctccactaccgacatgctgccgccatagtgaccaaagccaagatggtttaaggatttgagcgtggcgacgcgaatatcgcgcgccagttgggtgatttcggttacgttcattctttcgctccgctattttcctgcacttcggcagtcgcttttttgtttttggccaacacgttgtacgccaccagtagcgcgaatagcgccaccaccagccccgtgatagccatcggcgacagataacgcgccaggttgcccaacaaaataccgattacgccaaagtcagcatccgagaacgtggtattggcgaagccgatcgcgccgagaaccggcagtaacagcactggcaggaaagtgattaatagaccattagcaaatgcgccgatcatcgccccgcggcgaccgccggtggcattgccaaagacgcctgcggtcgcgccggtaaagaagtgcggcacaacgccaggcaggattaacacaagcttcatctgtcccagcaggaacagccccaccagcccgccgagaaaactgaacaggaagccaatcagtaccgcgttaggggcatagggatacaccaccgggcagtccagcgccggacgcgcgtttggcaccagtttttctgaaaagccggtaaaggccggaacaatttcagccagaatcagacggacgccttgcagaatgatgaacacgccggcggcgaaggtgattgccatgatgatggcgtacaccagatagttttgcccgccgctaaacgtcgcttcgacatactcacgcccagcgctgactgccatgatcagatagataatcatcatggtcagcgaaatcgagatagaactgtcgcgtaaaaaactgaggtttttcggcaggttcatctcttccgtggagcgggagcctttaccacacaggctgccaatccagccggaaagcacatatcccagggtaccgaagtgaccaaacgcaatgtcatcggtaccggtaatccgcctcatataacgttgggccaacgccgggaagaaggccatcaccagccccaggattagcgatccggtgaagaccagccctacgccctcaaaccccgccacggtcaggattacgccaatcatacaggccatgtaaaaggtgtgatgcccggtcaaaaagatatatttaagacgcgtaaagcgcgccacgacaatattggccaccataccaaatgccataattaacgccgtggacgcgccatatttttccagtgcgattgagactatcgcttcattattaggaataatgccctgaatattaaaagcgtgttcaaacatcccccctagcgggtttaatgaacccaccagtacggttgcgccgccaccaagcacaataaaacctaaaatggttttaatcgtgccttttaccacatcggaaaacgcttttttctgcgccaccagaccaataagcgcaattaaccctacaagcaccgagggtacttttaaaatatcaacaacaaaattcagcgtttcaaggataaacatatccacctcgccagcaataattattgtttagcgaaccatgcgcgcaactgcgtttccagttcgttgatgtcgatgatgttattgatcaccaccagttggctttccggtacgctggcgctggccgcgatatctttggccattacaaaaagatcggcagccccgggcgtggccgatgaaagatcggagtgttccacctcggcgtcaatattgagtttctttaatacttttttaatgttcatttctaccataaaactactacccaggccggaaccgcaaattgccatgattttcattattgtcaccttttaaaagtagagttggtctgcatcacgcacgggcgtaatgttatttaccgcaagaaaatggaataaaatcagaaacggtcaataatcgttttaatgtcctccaggttttttgcctgatgtaatttttccatatctacatcactggaaaataattccgccagcgccgatatcatttcgatatgactgtgcttatcaggcgccgccagcataataatgatgtcaaccggatcgaattcgtctgcgccaaatgaaacgccgtgctgtagtttcagtaacgataaacctaaccctttcgccccctcttccggcctcgcatgcggcatcgctaaccctggcgctaatacataatacggcccaagcttttggtgctgctgaacaatcgccgtaatgtattccggtgcgataacacctgcgtccagcaggggtttgccgcaaatttccagcgcctgcgaccacgtttccacgctctcccgtagcgtgatggttgcgtcagataaccaggttcccagcatgttattcgcccccacggtgtatgaaattatgaacaaactttattcaagccattcgatattagctgcgatcgttatcacaaagatagcgctaccagcgactattactcagaattgtgatagcgctatcaaattaaaatcatggtgtgaaatcacagcaaaaaagcggatttaaggcgtatactgccagtcatgcgaagcaaagaacgacaataaaaaagcatctcaacatgttgtaatgacgcaggaatttgtatgtcgataccccgtaaacggcgcagtaccggtaaagtgactatcgccgatgtagcccaacttgccggtgtaggcacgatgaccgtatcacgagccttacgcacgccggaacaggtctctgataaactccgggaaaaaatcgaagcggcagtgcatgagttgggctatatgcctaatctcgccgccagcgcgctggcgtctgcctcctcgcacaccatcgcgatggtcgtaccgaaccttgcggaagcggggtgttctgaaatgttcgccgggctgcaacaaattttacagcccgcaggctaccagattatgctggcggaatcgcagcatcgcgtggaacaagaggagaagctgctcgaaacgctgctggcctccaacattgccgcagcgattctgcttagcgtcgaacatagcactaccgtgcgccagtggctaaaaaatgcctctatcccggtgatggagatgggcgcgattcgcagcgatcctattgatatgaatatcggtattgataacgttgcggcaatgtatgagctgacggaaatgctgattcagcgcggttatcagaatatcgggctgctatgcgccaatcaggagcagtggatttttcagcaacatctgcacggctggtacaaagcgatgcttcgccaccatatgtcgccaaaccgggtgattaatgccgccttgccgcccaatttttctaccggcgcgtcgcaactgccggagtttttactggcgtggccggagctggacgcgctggtatgcgtatcggatgagctggcctgcggcgcgttatacgagtgccaacgacggcggatcaaagttccggacgatttagcggtggtcgggtttggcgatagcgatgtcagccgggtctgccagccgccgttaaccaccatggccgtaccgcaccgtaagattggcagtgaagccggacgggcgctgttggaaaggttaaatcagggaaactggagcgatcgaaaatccatcgcctccagtttatgtatgcgggaaagctgctaaaacgcttattccgtctcttccggtttctcctggagcgcggcttcgtttttggcgttgcgggtcatccacagcgccagcgctttgagcgaatctggcgtaaactcatcacagcgcgcggtgatctcctccggggtcagccaacacacttcgctgacttcatcttcctgaagcgcgaaaggcccgtgggaaacgcagctaaacagcgcgccccaaacccggcaatgttggtcttcaaagtaaaacagaccgtgttcggcaaacggcacgcctgcaatacccaactcttcttccgcttcgcggcgggcagattccagtagctgctcatcagcctgaaccacgccgcctgcggtagcatctaacataccgggcaaaaaatcttttgtttcggtacgacgctgcaccagaattttacccataccatcatgaacgacgatatacgtcgcacgatgccgtaagcgttgcgcacgcatctgttcccggctggactgtgcaatgacttcattgtcttcattcacaatatccacccattccgtacttgccaaacgacgctgttccaccatcaggaaaccttcttatttctggcgctcttacggcgcatttacgtttgtgaggtaaattacgagttaattgcaacctgcgcaatgatactttgatcattgagtgcgattacgctcaacacattatcatccagaataccgtagcttgccgcatacccgcctttcgggatactcactgacccaggattaaagtgatacagtccttcctgctgttgcgccaccggcagatgcgtatgaccataaaccaacacatcgccagtatgcagagcgggcagattcgtcggcccgaagaggtgcccatgcgttaaaaatagccgcctctcttgcgtcaatatttgctgccacggcgcagtgatcgggaaatgcagcagcatctgatccacttcgctatcgcagttgccgcgcacggcaatgatttgcgtcgccaccgcgttcaggcgttcggcgacctgggcgggcgcatagccttcaggcagcgcatttcgcggcccgtggttaaggacatcgcctaatatcaccagccaacgcgcgccgctttgcgcgaaccgctcaagcacgcgttccgtggcgggtaaagaaccatgaatgtccgatgcgaacatcagtttcatcgctcactcctcgttgtgaaaaacggcgttatgatactggaatatgaatagattttcagcctgaacgcttcgaggaaagcgcaataaaacgctgtacggaagcacgctgccactggaatgtcgcatatgccgccagcgatgtcggcacgtcatcgccatgcagcgccagacgattgatcatcaatgccagatcggtatcggcaatgcaccattcaccaaataaattttgcgtcccctgccccaatagcgcttcagccgtcgcaaacagttttgccgcgctggcttttccagcctcgcttaacggcgcttttttcgccccggcaaacaccacgtcggtaggccgttcttcgcgaagcggcagtaaatcgctgcgtagccacgcctgaatctgtcgcgcgcgggcgcgtttttgtaaatcgtgcgggtagatacgctcccactgcggcggcgcgaaacgctcctccaggtattccgcaatagcggacgactcgctcagctcaaaattgtcggcctcaagcaccggtacgcgctgcgtcagcgcatatcctcgccagccaggttgcagatgttctccctggtccagatcgcgagttttcagagtaaaggaaagccctttttcttgtaatgccacccaggcggacaagacgtagggagagaaaaagttcgcatccgaccacagcacaataacaggcttactcataatgtcctcttgagggcgtattaggtttcttcccaaaatatagcgtctttcgcctgctgtcacctgatgaaaactcacacacatcaggaggctttctatacttaattcagcccagactctttacgcacatgcaggagccaaaatgattgacctttactacgcccccacgcccaacgggcataaaataacgctgtttctggaagaggcggagctggcgtatcgtttgctaaaagtagatatcagcaagggcaatcagtttcgccctgattttttggctatctctcccaataataaaattcctgccatcgtcgatcacgccccggcagacggcggtcaaccgcttagtctttttgaatccggcgaaattcttctctacctggcggaaaaaagcggcaaactgcttagcggggagctgcgtgaacgccataccacgctgcaatggctgttctggcaggtcggcgggttagggccgatgctgggccagaatcatcactttaaccactttgcgccgcaggccatcccctatgcaattgaacgctatcaggttgaaacgcaacgcttatacaacgtcctgaataaacgcctggaaacctccccgtggctgggcggcgaccactacagtattgcggatatcgccagttggccgtgggttaacgcacatcagcgtcagcgaatcgatcttgatacctacccggcggtgtataactggtttgaacgcattcgcacgcgtcctgcgacagcgcgcgcactgttacaagcgcaactgcactgtaacagtacgaaagcgtaacgcggtagcatacatcatgtatgatgtagaggtgtatacacggaaaaaacctgcgtccggcacccttattcgtattaaaaacctgacattagggaagaggaaatcctccctactctggaggtcatatgcagattctgattaccggcggtacaggcctgatagggcgtcatctcattccccggctgttaacactggggcatcaggtgacggtcgttacgcgcaatcccgataacgcgcgtcagattctcgattccagagtgacattatggaaagggctggcggaacgtgagcacctcaatgagattgatgccatcatcaatctggcgggcgaaccgattgccgacaagcgctggacctcgcaacaaaaagaacggttgtgccaaagccgctgggctatcacgcaaaagttggtggatttaattcatgccagcgctacgccgccctcggtgttgatatccggctccgccacgggctattacggcgatctgggcgacgttgtcgtcactgaagatgagccgccgcacaacgaatttacgcataaactttgcgcccgctgggaacagattgcctgtcgtgcgcagagcgaccagacccgcgtctgcctgctgcgtaccggcgttgtcctggcgccgcaaggcgggattctggggaaaatggttccgccgtttcgcctcggactcggcggtccggtgggtaatggtcgacaatatctggcctggattcacatcgacgatatggtcaacggcattctgtggctgctggataacgatcttcgcggtcccttcaatatggtctcgccgtatcccgtccataatgagcagtttgctcatgcgctgggtcgcgcgctgcgccgcccggcgattattcgcattccggcgacggcaattcgcttattgatgggagagtcgtcagtgctggtgctgggcggacagcgggcgctgccaaaacggcttgaagccgccggattcgcatttcgctggtatgatttagaagaggcgctggcggatgtgattcgctagttcctaaagcgccgtatcctgcccggtacgcaatgcgccgccgggcttcttttatttcagcgagcctttcaggaattgctgtaaacgcgggctttgcggattgccgaacacctgctccggatcgccctcttcttcaattttcccctgatgcagaaaaataacgtgcgaagagacatggcgggcgaagcccatttcatgcgtgaccaccaccatcgttttgccttcttccgccagttgttgcatgatgcgcaacacttcgccgaccagttcaggatcgagcgccgatgtgggttcatcgaacagtaaaacgtcaggttccatcgccagcgcgcgcgcaatagaaacgcgctgctgttggccgccggagagatggacgggatatttgccctgagcgcgctcatcaatccccaccttcgccagatatttcaacgcccgctcgcgcgcgtcgtgcttgcttaatcccagtacctgaatcggcgcttccatcacattttccagcaccgtcatgtggctccagaggttaaagtgctgaaacaccatcgtcaggcgggtacgcaacaagcgtagctgatttttatccgccactttgagctgcccgtctttgtcgcgcaccagattaatgttctgaccgttcacgataatcgcgccttcgctcggtttttcgaggaagttaatacagcgcaaaaaagtgcttttaccggagccggacgagccgatgatgctaatcacatctccggcgcgggcctgcaacgatacccctttcagcacttcatgaccgccgtagcgtttgtgcaaatcgataacgtgtaatttattttctgacatcatgttactcgaattatttagaggacacgtgctgcaaccagcgtctttccgcccgacggaacaggcttatcaggacatacgaaatgagtaaatacaacacggcggcaatgccaaacgcggtaaacggctggtaagtcgctgagttaatatcgcgggcgattttcaacaaatccggcaccgtcgcggtaaacgccagcgccgtagagtgcagcattaaaatcacttcgttgctgtaggcaggcaaggcgatacgtaatgccgacggcaaaataatgcagcgatacattttaaatgacgagaagccataggcccgtgccgcttcaatttcaccgtgcggtaccgaacgaatcgcccccgcgaaaatttccgtggtgtacgcgcaggtattcagcgtcagcgccagtacggtacagttcagtccgctgcggaaaaacgcgttaagaagatcggtgcctttgactatctccagcgtatacatccccgaatagaacaccagtagctgtacgtacagcggcgtgccgcgaaaaatatacgtaaacagccagatgggaaaacggatgaatttattactggaaacgcgacctaccgccagaatcaccgccagaagaccgcccatcaccaccgatgaaattaacaaccacagcgtaatcgccacgccggtaaaacgatagccatccgtccacagcagggatttccagtactcctgaatgatctcaatcacaaatcggccctcttcacgcccacagaatagcgacgctcaagcaagagcagcacaccattggaaacggtggtaaataccaggtagataagtccacagaccacggcaaaatagaaaggctcccaggtgcttttaccggcaagctgcgtggctttgacgacatcttccaggcccagcagcgacaccagcgccgtcgctttgagtatcacctgccagttattgccgatccccggcagggcgtaacgcatcatcgccgggaacataatccgccggaaggtttgcccgtgggtaaaaccaaaagccgtcgccgcctcgatatggcctttcggcaccgccataaacgcgccgcgaaaggtttcggtaaaataggcgccgtagatgaaaccaagggtgataataccggccaccatcggatcaatatctatctggtcgatacccagcgaatcggtcaccacgttaagcgcgatttgcaatccgtaaaatatcagcagcattaataccagatccggcaccccgcgaatcagggtggtgtacccttcaaaaataagccccgttacccggttttgcgaaagcttcgcccccgcgccgacgagaccgataagcacggccagcaccacggaactgagcgccagttccagcgtgacgatcgcgccctgtaaaattacgcctgaaaacccgtacaacatgcagcctgtcctgttgtgtgtggtgaagtaagaagcctcttttgcatttttgcctcacatcacgccggatggcggctgtgccttgcccggcctacgatgctccccgtaggcctgacacgcacagcgccatcaggcaatgcagacagtcaacattctttgggctttatctgcaccgacggtgattaaccgccataaacatcaaaatcaaagtactttttcgccagcttttcgtaagtaccgtcagcacgcatttcagcaaaggctttgttcagcgcttcgcgcagctcgttatcctctttgcgcagccccataccggttcctacgccgaataacttctcatctttcaccgccgggccgccgaatttatagtcttttccgacgggctgtttaaggaaaccttcgctggccgcgacctcgtcctggaacgccgcatcaatacggccagccgtcagatcggaataaatgttgtcctgcccctggtaagagacgatctcaatccctttcggcgcccagtgctcattgccgaaggtctcctgcgtcgtcccctgtagcacgccgacgcgcttacctttcagcgacgcgacggtcggctgaatatcagagttcttcgccaccaccagacgggaatcagcggcgtaaagcttgtcggtaaacgcgatttcctgctggcgcttttcagtgatggacagcgaggacatgatggcatcaattttcttcgcttttaaagacggaatcagcgcatccagcgggttttccacgaacgtacactgtgtgttgatacgtttgcacagctctttggccagatcgatatcaaagccgaccaattcaccttgtgcatttttggattcaaacggtgcgtatgtaggatcggtaccgatacgaatcttttgtggaatagcggcaaatgctgcggtagcgctggaaaatgccagcaccagagaaagggataacgccagttttttcataactatcctcaacagactgtctttccaggagatctttacagatccgatgcgactatcgtgccattaatcaggccgacaaggcaaagcattctaccttgtcagccggtttattttgcataaaaatcgattaagtatgcatttatgcgcctgttccgcaacggcttatgcaccaaaaaggtgcaaaacatctattttgcaccgtgatagttccccagcgcggcgcgttatccccttccctcaatcgccgtagacattaaaatcgaagtactttttggccattttgtcgtaagtcccgtcctggcgcagttcgatcagcgctttatcaaacgcggcttttagctcggtatcgtctttgcgcagcccaacccccgtcccgtcgccaaaatattttttatccttcacggaaggaccggcaaacgcatactctttgcccgctggctgcttcaggaaaccttcgctggcggcgacttcatcctgtaatgcggcatccagacgaccggcggttaaatcggaatagataagatcctggttggcataagccaccacatccacaccttttgtgcgccagttatcattggcgtaagcctcttgcgtggacccttgcagcacgccgacatgctttcctttcagcgattccagcgtcggctgaatgggagacccttttgccgcaatcaggcgtgaatccgccgcgtaaagtttgtcggaaaacgcaatttcttgctggcgtttatcggtaatagagagcgatgaaataatggcatcaatttttttcgcttttagtgagggaataagcgcatcaaagtcgctggcgacccaggtacatttcacctgcatacgcttacacatttcattaccgagatcgatatcaaagccaataaactcgcctttggcatcttttgatgagaaaggcgcgtaggtggtatctgttccaatacgaaccgtttgcgggagcgcggcgtaactggccgccgtcgcgcccagacctatcagcaaagacaaagcgagaacggtcttcttcatacatacccctcaagtggcgtcattttcttatgttttacgtggtgttgtgtgtttgcagactttttcatgcaggtcttatgccattttcacgtcagcaaaacgattcgacgttaaatttgttaataaaacgttgcaatattgtcctgatgttgaagatagcaggtatgacggttgaaccgcagcgtttcggcggcttttaacgaattaaatgttgaggatatgatcgcggttacaaaattgccctgaaacagggcaacagggacaataatgcacgctaaacagacaacgctatgcgccctgccagcgaacaaaaagatcgtgcggaagggggatgtcaaactgatccagtactcggttaaccgtttgatttataacatcatctaacgtctgaggaagatgataaaaagccggaaccggcggcataatcaccgcgcctatctcagcggcctgggtcattaaacgcaaatgcccgatatgcagcggcgtttcgcgcacacacagcaccagaggtcgccgctcttttaatatcacatccgccgcgcgggtaagcagtccgtcagtataactgtggacaatccccgacagcgttttaatcgaacagggcaagataaccattcccgccgtcgggtaagagcccgaggaaatgctggcggcaatgtcgcgcgcatcgtgcgtcacatcggccagcgcctgcacctcgcgcagcgaaaaatgggtctccagcgccagcgtttgccgggccgcctggctcatcaccagatgcgtttccacgctatcgacatcgcgcaaaatttgtaataagcgcacgccataaatcgctccgctggcgccgctaattcctacaatgagtcgtttcatgttctcttaccgtttacgagcgccgttcatcccactgtgttacgtaatcggctcaaagtgggtctgaagagataccatgacaaaagaatccctatcataaaagccagctcaaccaacattatcactaccccttgctcactaaaccaggtgccgaccataatggcaaaattggtgataatgacaaatcgggccgtccaggggaaaagcggcgatcgatagcgtagcaaatcgctggcgtacgttccattacgcaccgattgtcggaaacgatactggcaccatccgatggttatccatgccaggcaacccacctgcccggtactggcgatcagatataaataaaattgctgtgcgggaatatagcgggtcagcaacgacactaacgccaacaaggccgtgattaaaatagcatacaccggcacgccgccgccgttcgttttaccaaagcaggctggcgcaaagcgatcgcccgccatagaccacagcatacgcgaactggcgtaaatggccgagttagcggcagaaaccgcggcggaaaagatcaccagcgtcatcagcgtatccgcccccggaatgcccgcgtgggagaatacccatacaaagggactttgtccatttggcgtcagttcatgcggatagaccagcgccagcaccgcaatcgccaggccgtaaaacaaaatgattctgagaccgatccccaggatcactttcggtaaaataatgtgcggcgattcggtctcccctgccgcatttccgaccagttccaccccctggaaggagtaaatcacgatcgtcatacagaccacaatttgctcccaaccgtggggaaaccacattccgtctatttttaacgtcgggtgccagtcactatggcccattagcgagtagatcatgaccccgcccgcgcagataaacagcacgatcgcgaagaccttaatggccgaaagccagtattcgcattcgccaaaactttttgcggaggtgagattgatagccgtcaggatgagcagaatcgccaggcagaacatatataccggaaccgcggggaaaaactggtgagcaataaaccctgcggcagtgaggtcggctgccaaggaaaagacccagctaaaccagtaaagccagccaatggtatagctccagcaaggtgacggcataaacatcagcgcgtaatgttgaaatgaaccggagtgaggaaaagcgcatgataattcgccaagacacatcatcgtcgccagcataatggttccggcaaacagataggccagtaaggttcccgccggcccgacgctgcttaacggttcggcaatgccgataaataagccggtgccaatcgtgccgcccagcgacatcatcagcaggtgccgcttcttcaggttacgccgcagaccgccttcaggctctgctggcggagattgttgcagggtatccatcgttactccctgtctttcgtgaggtcaaagatgccgccgcgacatagccgcggcggttatgcgttaacgcgtaaacctccaggcgacgcctttggtctggcaggccattaacaggcccgtataatccagctcaaagcgaaccacatcgcctacttttagcgactgacgacaatcctcaatatccaccagcgtatgatcgctggtttgtcctaagatagtgatagcgtcgtcgcatggcacacagttatccgacggcacatcctggcgaccaaacgccagcaatgcgcgtcggcgtatgccacgatcgacaaaggttttactttgcaaaaaggcatcgacgcccagctccccgaccgggacggtaggtttactgttcagttcgatgatttccgcttccaggatatacatatcggaacaggctttatcgaccggttttgcggagtggtgaaattcattcaggtatttcatgtccacatattcaatgccgaattcatgcagtccgccgatgcgcagatgattcagtccctgcggccagatacctttatccagcaggtgatagctggtgcagtttcccgcagaaagccgccggacaggaataccgctgtcagcttccagccgggcggccagcgccagaaaatcctcgccattttttaccgttggcaacacggtgccgtaacaattaaagttggtgcccagtccatataattccagaccgggcagaccagtaatcagagtcacggtctcaagaatgcgttgatattcaccaaaccagataccctcgcgtaaatcgcccatatccaccatcagtaatacctgatgcgttttcccctggcgttgggcttcttgcgataatgcccgtaataccaccggctcgctatttaaactaatatccgcgtagcgcaccacatcttcgatttcactcagacacgggctgcgtaacaggcaggtcgtacatcctgtctcgcgtatttttttcaaattataggttcgtgattcagcgataacggtaattccgccgttgaacaccgcctgcgcggtttccacgcagccgtcaaaaactttattgacagccatcacgtcaataccgctgcttgccagcagagctttttccgtgcgggcgttttcttccagcttgcgtagatttatttccagaactggcatatacattttattttcctcccgccatgcttaaacgggcattacgtttctgcgcccgatggtaaatgtactccgcgatgacaaccgccagcacggctccgccaataattttcccggcgtactggaaatatccgcccatatcaatttgagaaggcggaataaataacagcgcaacggcaaaggcgatagaaagaaagcccagcgcgggtaaaatagccggtaaaaccttgcccggaattttaaaacttcttggcgtatccggctgagtcttacgtaaacgccagaacgccgggaacatcaccaggtaaggaataaaataggtgatggtcgttagcgccgttaacatccagtaagccgccgcaacgcttggcgaaataaaagtcgaaaaacacaggaccgtgacaataatcgcctgtacagtcaaggcaaaggcgggcgttttccacaccggatgtaatttgccgattcggtcccccagcagattatcttcacgcgaggcttcctggagcatataaatcggccccaccagccaggagttaatctgcccgagagcgccaaaaaacatacagatggccataacaggaattaaccacggcatatgcagcgtatccgcagcagcatgcatagcctgcatgacgcctgccacaatgtcggttttcccggcgggtaaaagcgtatttagcgcccaggtgccgaccatatagatcccgacgataacggcggcggagacggccatcgctcgcggaaaatcacgctgtggattacgggtacgcccggcaatcatcggggcgacctccagtccggcaaacgcaaacatcatgctggataagaaaacgatcgtatcccagtgtccgagatccggaatccagtttttcgctgtagtgtagtccgtctgcatctggtgtccggtacatagccatactaccgccagcaaaatgaggatggcggagggaataaatacgccgcaccaggcgctgatgctattaataatttttgtccattccatcccgcggatattcatcagcgttaatagccagaaaattaccgcggaaccaataccgataaacgctttattttccgccaggccgccgccgatcatatagcccaacgcggtaaagccgaattgcagcattaatgggaaaaacagtacgcaggaaaagagaaaacaaaccacgacaatccatgcaatacgtttaccaaatgcctctttaatccagacaaatatcccgccatctttcggccagccggttgacagctcgccgcataccatcgctaaaggaaaaaacaagcagaatgcggcgatcacccataacaacatggccgatgccccgtaaggcgccacgttagggatttgccgcaaactcagaatagcgatgacattcataaagacaatgtctttgatgccaagtaagccagaattcgtgttactcatggccatctcctgttatgcattcaggcatcactgccctcttcttatcatctgacgacgggcttcagcatgaaactgaagcccaaaacagtattaataaatgtcgtacttgaccatatcttcgtaactgtcttcccgacgaatcagacgcgtctcaccatttttatcgatcatcaccacccccgtgcgcggacggttgttataaacggtttgactttcaatggtgtatgccccggcatcaagaaacgcgacaatatcgccaacatgagtctccttcggcagtaaaaactcttcgcctttcacccccatgtggaaataatctccgccatcacacagcggcccggctaattttacccaggcgtcgtgcgctgccgtcatgcgagaggcgttatagacataaaagaaccagtcaaaatgctggctgtcagagagtacgctgtaaccagcgtcgacaaatttccattcaacgtggcattccacattgccgttaagatcgtaatttgttttacgtttttcgcaggagacttccgtcagtaaaaccgccgccgacccggtcactttacgtcccggttcaatacatatttccacatcggtacgccatttatgcacttcgcgaatgaccgcatcggcaaaatcctgggcggtaataccggcatacatattatcttttaacgggtcgccattctcgtcgtcatatttatagggaaccggaattccgccgcccacgttaatcaaatcaaatttaataccgagcacctcttccagacgacgggattcatccaccagcactttagtcgcttttgcgaaaggctctgactccggcacctgatcgcctacatgcatatgcaagccgcgtaaatgcacataaggcatcgccagaatgcggcggcaggtttcttccgcctgttccaggtcgagacccgacttcgcatggaaagcggtaaccagttccgcatgcgtcgccgagggaacattcggttctacgcggacgcaaacattggcgactttcttcagcttgcgagagatggcatcaatatgttccagctcatacaggctatcaacattaataagatacagatcgttagcgatggcatattccagatcggcaggctttttcaccacgccgttgaagacgatctgatctccgcgaaagcctatctccagacacttgcgaacctcatattgtgagtttgcctccgcgcaaattccggcgtcacgaatggctttcaatacccccatgaccgagcaggtttttgacgcaaagaaggttttggtatttttatgcgccgcaaatgcctgctggatttcatgaatgttacgaataatctccggctcagaaaacacatagaacggcgtggggtactggcgcgccagtgcgtccagatcgaccccttcaaaacacaaatgaccgtctttgtgctggaaacggcgatcgccgttgattacctgctcacgtagctggttgtaattctgcataatcgagtcagtcataacgccctctgcttaatgtttatggtaaaaatacgcattctttacagggataaagcaaaaggcatgccactattttttatcaaaataatcaattacttataaaaataagctatttctcattttcgtcattgagtttgctattcatcacaacgacgaaaattcgtcacttttataatggcaacatgaacaatagatatgaggaatgcatgtatggcatccaccaatcaggaactggcctcggcgctcaggatgttttcccgctttttcgatttgattcatcagccgttggccgtcattaatgagcgtggtgaatacgtttactacaatcaggaaagcgcggatctggacggctacagcattgaacgggcaatgggaaaacatatgctggatgtctatccgggcatgaaagagacgcaaagtacgatgctttcatcgttaaaaaaaggcgtggaatacattggccattatcaaatttattacaatgcgcgaggccaggccgttgactatcagcacaccaccgcaccgctctatgcaagcgatggcggcatggtcggcgttatcgaaatcggcaggaatatgtccggcgtcaggcggctccaggagcaggtggtagaactgaaccaactgctgtatgccgatcgccatgagaagcaccatgccattattaccgaaaacccggaaatgctcagtaatatcgccaaagccaaacggctggccgccagtaatattccggtgacgattgtcggggagacgggtacgggtaaggagctattttcccgcctgatacatcaatgcagcaagcgggcgaataagccatttatcgccctgaactgcggcgctctaccgcctacgcttatcgaaagtacgcttttcggcaccgtgcgcggcgcctataccggcgcggaaaatagccagggctatctggaactggcaaacgggggaacgctctttcttgatgagctgaacgccatgccgatagaaatgcaaagtaagctgctgcgattcttgcaggataaaaccttctggcggctcggcggacaacagcaactccactctgatgtcaggatcgttgccgccatgaacgaagcgcccgtcaaattaattcaacaagaacgcctgcgggcggatcttttttatcggttgagcgtcggaatgttgacgttaccgccgctgcgcgcccgcccggaagatattcccttactggcaaattattttattgataaataccgtaatgatgtgccgcaggacattcacggactaagcgagacggcgcgtgctgatctgctcaatcacgcctggccgggtaatgtcaggatgctggaaaacgcgattgtacgcagcatgatcatgcaggaaaaagacgggctgctgaaacacatcatttttgaacaggacgagttaaatttaggcgtaccggaaaccgcgccggaaaatccccttccctcgtcacccgatccgcagtatgaagggtcgctggaggtacgggttgctaactacgaaaggcatttaatagaaaccgcgctggatacgcatcaggggaatattgccgccgcggcccgcagccttaacgtatcgcgcaccacgttacagtacaaagtacaaaaatacgctattcgcttcggcgtggtgcgtaattgacatcggccagcggcattgcgccgctggcaaagccattagccttcgttatgcatttccaggttttccatttcgttctggaacagcaccgctttggcgtcgtcattacgtaatgaatccaggaagtcgaggtattgctggtctacgtctttggtgacatataccccgttaaataccgaacattcaaactgctggatatccgggttttccgcgcgtacggcttcgatcagatcgttcagatcctggaagataagcccgtctgcgccgatgatctgccgaatctcatccacctcgcgaccatgcgcgatcagctcattggcggtcggcatatcaatgccatagacgttggggaaacgaatttccggcgcggcggacgccagataaaccttcttcgcgccggcttcccgggccatctcgatgatctgctctgatgtggtgccacgtacgatggaatcatccaccagcaggacgttcttatcgcggaattccgcgcgattagcattgagcttacggcgcacggatttacggcgtagctgttggcccggcatgataaaggtacgtcccacgtaacgatttttgacaaatccctggcggtacggcttgccgagaatacgggcaatttccagtgcgatatcgcaggaggtttccgggatagggatcacgacgtcgatgtccagatcttcccattcacgagcgattttttcgccaagtttggtgcccatattcacacgagcgctgtagacggagattttgtcgataaaggagtccgggcgagcaaaataaacgtactcgaacaggcagggattactgaccgggttatccgcgcactggcgcgtgaacagttgccccttttcggtaatatagatagcttcgcccggcgcgacatcgcgcagaaactcaaagcccagcgtatccagcgccacgctttcagaagcgaccatatactccgtacgaccatcgccaacgtcacgcttgcccagcactaacgggcgaatgccgtgcggatcgcgaaaagccaccatgccgtggccgataatcatcgccacgcaggcataggcgccgcggatttgacggttagtcgcggcaatcgcggcaaaaatattgtcggcttccagcggatagtgacggaagttgtcgagctcgctggcgaaaatattgagcaggatttcggaatcggaggtggtgttgatatggcggcgcttttcttcaaacagctttttacgtagctcatgcgcgttagtcagattgccattatgggccaacgtgatgccatacggcgagttaacataaaaaggttgcgcttcggaagcgctggagctgcctgcggtagggtagcgcacatggccgatccccatgttgccctgcaaacgctgcatgtggcgagcttcaaaaatatcgttcaccagcccgtttgccttacgcaagcggaagcagttattcgcatcaatggtgatgataccggcagcatcctgaccacgatgctggagcactgttaacgcgtcataaatcgactggttgaccggcataacaccggcgataccgacaataccgcacatacgtcattttcctcgttaagccacatctcagaacctgttacgtcctgggcaagaaactcgacgagctttgcagatagtcaaagaaccatctgatgatgaagctgaactgcgggatgagctgcgatttgctccagtcttcgcttttcgacaagccggtaaaggtatcaaggaagaacagaatggcggcgacaatcagcgcgcctcgcagtgcgccgaaacagatccccaacacccggtcagttcccgacaggccggtcttctctactagctgacctatcacaaaattcacgatagcgccgacgataagcgtcgcgataaacagtaccgcgatagcaatcccattacgaaccagttcgtcttcaaagcccgtaaaccagacagacaggtaagtgtagtagtgactggcgacaaagaaagcacaaccccacgtcaccagcgataacgcttcacgaacaaagccgcggatcaggctaaccagacaggaaaaagcaatcaccgcgataatggcgtaatcaatccagaccatagatgtcccacgattttacgccctgtcgtcctgttcggggcgcattctaacagaaaaagaaaacgtttgcgtagggatttccttcccacgcgtaaataaaaatggcgctgaaaaaatattcaacgccatcacactttttatctcttcgggcacgaccagaagagctgccatcggcctgataagcgcaggataccaggtttattccttctgccggatgacggcgtaaacgccttatccagcctacagaacttcggctattaccagatgaacaccgtaggccttaacgctgcgcgctcaggcaaaacgcgccttagttcgggctatatcccatcaccacgccgcttaacccggaaatctgcttgagctcgccaagcgatcctttcatcttatctttcgacgcatccggcccgacgagaatacgggttattttaccctgtaccggcgttgagggggaagtataaacccggaacccggcggaacgaagcttgccgactatctcgttgactttatccgcgtttttcagcgcgcccaactgtacgacataggctttgccggtcggcgcaggtttatcgtcggcgactggttgcggcgcgggcgtcggcgtggaagcggcgacaaccggctgttgcggtttaggctgcggtttcggcttttcaaccggcttcggtttaggcgtctccgccggtatcggatcaagctcaacattgttagacgccatgcgcgacgggtccagcgatggcgctgccgcatctcccgcccgcacctcttcagccgccccttccggcggctgtgtcggcagcgcctgcgttgcggcaggcatcatatccggctcatcacggtcgccaggcttcggtaccagtggaatcgcagcaaattcatcctgataatgctttttctgtccgtccagcagaccgggaagcacaataacccccagcgcgactaacacaatcgtgccgactaaacgattctgaaacttactcgccaccgattctccccgcgtctatcacttccataacatgtgcgacggtgtggaatgatccgcacaccagcacggtatcttctggctgcgccgcgtcgatagcggcctgccatgcctgcgcgacgctatcatagacattccctttccccagatgttccagaagttgttccgccgtcgcgccgcgcggcccctctaacggagcacaataccagtcgtcaaccacgcttttcaaccaggctaacgtgccggcgatatctttatcatgcagcataccaatcaccgcaagcacgcgcccgcgtttcggcaacattttcagacgacccgtcaggtattccgccgcgtggggattatgggcgacatcaaagataacgcgcggcgactcactcacgatttgaaaacgtcccggcaaggtagcctgcgcaataccgtcgcgaatcgcctgctcgtcaatgttcaacctgctggcgcgcagcgcggccagagcggtggcggcattcggctgaggaacctgcggcaacggcagtccggcaagcgtgccgtcaccatcggtaaacgcccagtgggtcgctgtcacctcataacgccagtcaacgccgcgacgccgcaacagcgcgccggtctcctgcgcgacatccgcgatggttgtcggcatttccggttcgccgacgatagcgggtttttccgcgcgaaaaatcccggccttctcgcggccgatactttcgcgatccggccccagccagtcagtatggtcaagcgcgatgctggtaattaccgctacatcggcatccacaatgttcgtggcgtccaggcggccgcccaacccgacctccagaatcaccacgtcaaggttagcctgtttaaacagccacaatgccgacaacgtaccatattcaaaataggtcaatgaaatatcgccgcgcgccgcttctatttccgcaaaggacgcggtatgcgcggattccgctaattctttcccctgcacgcgcacgcgctcggtgtaacgtaccagatgaggcgaactatagacgcccacacggtatcccgccgcgattaacaccgactccagcgttcgacaggtcgtacctttaccgttggttcccgccacggtaaaaacgaacggcgcaggcttgaggatgtccagacgcgctgccacctggcttacgcgctcaaggcctaaatcgatactcttgctgtgcaggttttccagataagaaagccacgaggccaggggcgacgcagcttgaggtatagatttgtttttcattgattccgctgcttctttacggtgaaaagcaaaagggcagagcctgcggccctgcccttttcagttatcaggcctcagactcctgatccggcgccggaggcaccaccacgccttcacgcggggcgtccgggttcggcgcgggcagattcatcagcttcgccagaatgctcgccagcttcaggcgcatttccgggcggcgaactatcatatcaatagcgcctttttcgatcaggaactcactgcgctggaatcccggcgggagcttctcacgaacggtttgttcgataacgcgcgggccagcgaagccaatgagggcttttggctcggcgatgttgagatcgcccaacatcgcaaaactggcggaaacgccgcccattgtcggatcggtcaataccgagatgtagggcagaccacgttcctgcattttagccagcgccgccgaggttttcgccatctgcatcagcgacatcagcgcttcttgcatacgcgcgccgccggaagcagagaaacacactaacggacagttgtcttccagcgcctgttcaacggcgcgaacgaagcgtgcgccaacgacagaccccattgagccgcccatgaacgcgaattcaaacgcggcggcgacaaccggcataccgtgaagcgtccctttcatgaccaccagcgcgtctttctcgccggtttctttctgcgcggacgccagtctgtctttatattttttggagtcgcggaacttgagcacgtcttttggctccagctcgctacccaactccacaagggaaccttcatctaacaggctatgcaggcgattgcgcgccgacatgcgcatatgatggtcacacttaggacagacctcaagattacgttccagctcagcgcggtataaaacctgaccgcagctatcacacttggtccacaccccttcaggaatgctagccttgcgggtgggagtaatgttgcttttaattcgttcaatccagctcattggtgacctttctgcctgaaccttagtcagctttattataaggggcgcataatgccatttttgcccccaacagaccatgaatgttgcacattaaaacataacagcccgaaactttggataaaaaagtggtcgaaccgctgagttactttctattttgcggcacgcgacgcagcgcgcttatgccggacaatctcaatgacgccaggtaatatcgaaaccacgataatccccacaatcagcagcttaaggttatcctgaatcaacggtatcgtaccgaagaaataaccggcgtaggtaaagagcagcacccacagcagcgcgccgatgacgttataggcggcaaaatgccgataggacatgtgccccatccctgccacaaacggcgcaaaggttctgacgatcggcacgaagcgagcgagaatgatagttttaccgccgtgtttttcataaaactggtgggttttatccagataactgcggcggaaaattttcgaattcggattactgaacagtttttcgccgaacagtcgaccaatcgtgtaatttaccgcatcgccgacaattgcggcgatcagcattaacgccaccatgacatgcacattgagatcgttggtttccagcgaagccagcgccccggcgacaaacagcagcgagtcacccggcaggaacggcgtgacgaccaggccggtttcacaaaacagaatcaaaaacaaaatagcgtacacccagacgccgtactccgcgaccagctccgccagatgcacatcgatgtgcagaataaaatcaataataaagtagatcaggtccatatttgtctttgcctttctacccgacacgtttcgggtgtacgattcggattagtccgccagaaatagcgggcccattggcggttttggaaggtcaaaccggtcagggtaatccaccgcaaccaaatatagcccctccgccttcgccgttgccgccgccagcgttctgtccctggccgctaacagctctgcgatccagctctccggctggttgtgagcgcctacttccagcaggctgccgacaatattcctgaccatatgatgaacaaaggcattcgctttgatatcgaccaccacataagggccgtggcgggtaacgttgatgtgcatcacattacgccacggcgtgcgcgactggcactgcaccgcgcgaaacgaggtaaaatcattttcgccaagcagacactgcgccgcgcgatgcatccgctctgcatccagcggctcatagtaatgcgtcacgccttttgctaataccgcaggacgcagtcgatgattgtagatgatatagcgataacggcgagccgtagcgctaaatcgcgcgtgaaaatcatccggtacagttttcacccagcgcacggcaatgtcaccaggcaaattcgcatttacccccagcgtccatgccgcatctttgcgcaatgcggtcgtttcgaaatggacaacctgcccggtgccgtgaacgccggcatcggtgcgcccggcgcagaacacgttaataggttcatttgccacctgcgagagcgctttttccagcttttcctgcacgctgcgcacttcattctgacgctgccagccataatacttgctgccgtcgtactcaatacccagcgcaattttatagaccggcgatgattgctgtccggacatcagtacagatactcctgcaccagcttctccgcaattttaacggccatcagcgcgccgccgaaacgcacgttgtccgccactgaccagaactgaatttgttccggcataccgtaatcattatgcacacagccaatagagagctgtggattgccggaagcgtcgcccacctgcgtcgggtaatccgtctcttctgacagtacgatatcttcaccgcgggaaaatgcctcgcgcgcctcttccgccgccagcggacggagcgcttcaaagctcaccatctgcgcatggccatagaacaccggtgactgcacgacactggcggagatcatcacgccatcgtcctgcaaaattttacgcacttcatcgacgatacgacgttcctggcgcacgctgccttcccgatccggcagcagcggcagcatattgaacgccaactggcggccaaagaaatcatcttcatcaatcggtatgccgttaagcagcttcgcactctgtccagccagcgcatcgaccgcttttttcccctgcgcggacgctgataacatactggtgacggcgatgcgcgacagtcccccctgatcgattaacggcttgagcgccgccagcagttgactggtcagactatcggcgaccgcaatcacgttacggttacggtaatccgccagtacatacgggttaacttccggcacgaccagcggcacatcaggctccagcgcgaacagaccgctggaatctatcaccaggcaacctgcattagtcgcgtcgtctatccaggcagccgatgcctctgcgccggcaacgaaaaacgccaactgcgcctgcgtccagtcaaagtccgccgcatcctggacaatgaccgacttgccaccaaaacggaggtgctcgcccgcgctttcatgacgcgccaacgcataaatttcaccgaccgggaactggcgttcagccagtgtttcaagcagggcttcgcctacggcgcccgttgcgcccagaatggcaatgttccagccttcagacatggtgatttactccagaaatacataagcgtccctgtcgcattattcgacagggagcattaagaagacattaatgtgccgggtgatgaacagcgttaaaacctagcttacacagcaaggcggctgccgtttcgtcgtcacacatcacgtataaagacgaccattcacggcgctcaagataatttttacgcaatttatcaaattcacccggaattccagcgactttacgcagcggcgcatcgtcgcggcgcacatcatacaccaaatgcgccagtcttttcagcgtcggttgatccagcgggccatgaagcgtaatacgaccaaactcaggcgcaggcagtaatgtctccagcgcgacatgctgctcgcggccaataaacgcgctatacgcctcaaagacctgagtggtgccgcgcgctttgccttccagcgtataaccggcaatatgcgacgtgccgatatccacggcttccagtagcgcgacgttaagatccggttcgccctcccacacatcaagcaccacgctcagcggctgcccggcattaagtcgcgccagcaacgcggcgttatccaccaccggaccgcggcaggcgttaatgagaatggcgccgggtttcagtcgacggatcagcgtctcatcggccagatgcagcgttttgtacggtccgtctttatagagcggcgtatggaaagtcaggacatccgcttcctgcaccagctcatccagcgtacgaaaatcaccctcgtccccgcgtgcggcgcgtggcggatcgcacagcaacgtgcggatacccaacgcttcaagcctggtctgtagccggcttccgacgttacccacgccgacaatccctatagtgcgatcgcgtaacgaaaagccgtcacgttcggccagcatcaacagcgcggaaaacacatactccaccacggcgatagcattacagccgggcgcggctgaaaaaccgatgcccgcctgcttcagccatgcctcatccacatgatcggtgcctgccgtagcagtaccaacgaagttaatcggcgtgccgctcagcagcgattcattcactttcgtgaccgaacgcaccattaacgcatcggcatggttcaattcttcaacggggatcgggcgacccggcactgcctttacctcacccaggcggctaaataattcgcgggcgtaaggcatattttcatcaacgagaattttcacgactgtcgtacctgtttgagaacgagagttaaccggacaagtgtgccataatctggccgccaggcatatattgctcagatttatggttaaaggataattaattatgcatcccatctccggcgcccctgcacagcctccaggcgaagggcgtaatcctctttccgctgcgagcgagcagccgctttccatgcaacagcgtacggtactggaaaggctgatcacgcgcctgatttcactgacccagcagcaaagcgcggaagtatgggccggaatgaaacacgatctggggataaaaaatgacgcgccgctactgtcgcgccacttccccgccgctgaacagaatcttacccagcgtctgggcgtagcgcagcaaaatcatgccaatcgtcaggtgctttcacagctaacagagctgcttggcgtcgggaataatcgtcaggccgtcagcgattttatccgtcaacaatacggtcaaaccgcgcttagccagcttacgcccgatcaactcaaaaacgtgctgacgctcctgcaacaggggcagctttccattccgcagccgcagcaacgtccggcaacggatcggccattattgcctgctgaacataatacgttgaatcagttggtgacgaagctggcagccgcgaccggcgagtcaaacaaacttatctggcaatcaatgctggaactctccggcgtgaaaagcggcgagctcattccggcaaagcagtttacccatctggcgacatggctacaggcgcggcagacgctgtcactacaacacgcgcctacgctacatacgcttcaggctgcgttaaaacaaccgcttgagccggacgaactcacagcgatcaaagagtatgcccagcacacttatcaaattcagccgcaaacggtgctgaccaccgcccaggtgcaggatttacttaaccatattttcctgcgtcgcgtagagcgggagactgatgagctggaaccgctctctattcaacccatctaccgcccgtttgcgccgatgattgaaaccgtgaaaaatctgtctgcgcggccaggcctgttgtttatcgcgctaataattgtactggcgcttttctggctggtttcttaaccacgccggaacgataatatcgtcaccaggatgccaaccacagcggagatcgctcccgcgaggaatacggaaggatagccgcatgacgtggccagcatgcccgccagcgggccggtaacgccgtaggagatatcctgaaacgcggcgtagccgccgagcgccgtaccgcgtacctgtgcaggtacgcgtttcacaacctccacgcccagcgccgggaaaatcagtgaacaccctgccccggtgagcgccgcgcctaccagcgctatccaggccgtcggcgccagccacaagagcagcaaccctgccgtctcaaccagcaatgagacaacggcgaccttcacgccgccaaagcggtccggcatccaaccgaacaatatgcgcatcagtacaaacgcaccgccaaacgcggtcagggtgaatcccgccatcgtccagccattgctgacaaaataaagtgaaataaacgtaccgatgacggcaaagcccacgccctgcaatgccaggcccaggcccggtttccagataagcccgaccacgctccacagtgaaggtcgctcccccgtatacgcaggcactttacgcacggtgccgttgaatgcccaggccagcagcggtaaaaccatcgtcgtccccgccagcgccgcgaagccgtggctatggatcagcaagcccaacggcgcaccggccgccagcgcgccgtaaatcgccatcccgttccacgacatcaccttaccggaacgcgttgggccaaccagccccagtccccaggtcagggttccggtcagcagctggctttcgccaaatccgaggatcaaacgcccgacaataagcagcgcgaattttatcggcgcggaaaccggcaacagcgcggccaggagccaggcggcgcccgccagcccgcaggcaaacatcccctgtaacgccgatcgtttagcgccatattgatccgccagtcgtccggcatagccgcgcgtcagtaccgtcgcaaaaaactgaatgcccacggcgatcccaaccatcgtattgctatagcccagttcgtgatgaacaaaaagcgggatgacgggtaacggcaggccgaccgtcatataggtcaggaaaaccgcaaaggcgatgcggaacagcgaaaaattcgcagacggggtcgttgttttttggctaactgctgtcatgcattactccagaatgcagagtaaggcggggaaaggccacgcccccctctacctgaacgtcaggattaaggtgcgttggataacgttaaacgcttacgcattatcggaaggataatgtagagagtgaagtctgcctgtgagacgcgaaacttgtcaaccttgaaattgcagccagggtatcaacgtggcggcgtgtcatcaaacagaaagggaaagaccgctttcatccctctcaccttaaaccgtccggtcacctgcttgcgctgttctggcgtcagtaacctgaacatcatctcccagatatcttcaggctccgcttcctgtaaggaaatgggttctggcgtcggttcctctccgctgtcgtccagataacgatgaacatagagagggaaaacagatatatgaaactcctcggcctttgatttaacacgcttacgcctgacccccgctttcccttcactgtacttatataaacgttcgcgaaccgcaggctcgcttcccggaaaccccggtaagccaagacattccttaaccgtgaaccattcctttgccatcggtttctttcctttcccctgatgaaataaaaatatttcttctttttcgcgaaattttgctttctttctggcactattctcagagtgaaaaagaaagtaactttctttttctcgcgctaatttttaccttaaaaatatcggtgccgataacacatcttcttaggattacagaatggaaccaaaaagccaagactggcatcgtgcagatattaaaagtgcacttgaaaaaagaggtattacgctcagagatctttctcgtcaggccggtttatcacctgattcactgcgcaatgtctttacccgttcctggccgagagctgaacggattattgcggacgcgctgggcatcacgccgcaggagatctggccgtcgcgctatgatgatatgcaaataaaaaatgatgccgatatcgcagaataatagttaatgctgaataaattagccctaacttatcaatctcaacaattaataaatatttaaacttattctattgaaaatagtaatagcactatctgtcatgcttcccgaatcaaatactgttaaagcattacgtcattgctattacgtattttattaacaggaatcattatgagttgggataaaagagtggcggttaattatgccaaaacgcatgcaggttctcattctcaaggccggtgtgcggaatttacccgaaaggcaattcaggcgggcggtatcacgctggggcatacgtatcatgcgaaagattatggcccaatgttaagaagcgccggattcaccgctattggtacctatgaaatgccgcgcgagggtgacgtcatcattattcaaccttacgctggcggaaacccgagcggtcacatggcgatatacgatggcacagagtggtattcagattttaaacaacgcgatatgtgggccggcccgggctaccgggcagccaggccctcatataccatctacaggaagaattaatgaaaacgttctcccttgtcgcgcttatcctgttgctttgtagttgctccacgcctcatcacgacagtacgcaggccgtgaagcagttctatacctcatggatgacgacgttcacgaacgatgtgaatccccctgacgacaccaccgccttaatgcaacgttacgttgccaaagaggttattcatcgcctggcgctaatacagtccctttatgaacaggagattgtgggggcagattattttatgtatgcgcaggactatgcgccagagtggattccacagttacgggttgggaaggcacaccctttcctcggcggagaaaaagtggatgttctgttggctacagagtcaacgcccatccacctggaagtttatacccgttgggaagagggacgctggaaaatttaccgcgttcgggatgctgacaggggttatgaacagccgatttatgacgcaggcgccatcacccaggctgaggcctggtcagcgaaagtcgcgccggaatataagaagcattaaaaaagggaaccgccatcggtctcttgttcgtaccggagaggttaaagcgcctcttgcatcaggcgcttattccgtcgctgaaaacagtaagccgaaaataacccaggcattatttaaaatatgaagtattatcggtatcattaaccctcgacttctcattcgaacaacgcataatatcgatgaaaaaacaaacagataaacaaaagtcaccgcaaagagatattgtgtatgcataaatgcaaaagcgagtgaagtaataataataccggaagctcttgagtatcgaccccaaccgatactgctgtttaataaaaaccctctgaatataatttcctccgccacaggagccagaaagcacatcgccagcgtgttaagaaatttatgaagaaaaaattgccttgataactcggccatccagggttccgggccactaaaaacattgtagagaacggtaaggcacaccagggccagcgccggaacaaaacactccacgaatgataagcgacccaatgataaaaacgggtaatactttgaataaatactccaggcggcaatcgcatagacaaaaacaatactatatataaaaggcgcagccagacctcccaaataaagccaggcataggaaggcgaaaatgaggcaaaaacaaaaatgccgaacaaaccaaataaaacagccacacaactcaaactatgcctaattttatctaatgtattagttggcatttatataatatccatataatttgttgttccctgaatgaaaaaacaggtcgcattagcgacctgtttcattattgatactacaacgtaatagtcaggcttacaacttacgcatcaccagcgtggcgttggtgccgccaaaaccgaagctgttagacattacggtagtcagttcacgctcggtcgtttcggtcacgatgttcagacccgcagcctgctcatccagctcttcgatgttgatactcggcgcgataaaaccgtgctccagcatcagcagagagtagatggcttcctgcacgccagccgcacccagcgagtggccggtcatcgctttggtcgcggagatagccgggctgttatcgccaaacacttcacggattgcaccgagttctttcacgtcgcctaccggcgtggacgtaccgtgagagttcaggtagtcgatcggcgtgtctacgccgtgcatcgccatctgcatgcaacgtactgcgccttcaccagacggagcaaccatgtctgcgccgtcggatgttgcgccgtaaccgacgatttccgcatagatatgcgcgccgcgcgccagagcgtgttccagctcttcgacaacaaccataccgccaccgcccgcgatgacaaacccatcacggtgcgcatcataggtacgggacgctttttcaggcgtatcgttatatttggtggacagtgcgcccatcgcatcgaactcacaggccatttcccagcacagctcttcgccgccgccagcaaaaacgatgtcctgtttgcccagttggatctgttcaaccgcattgccgatacagtgtgcggaggtcgcgcaagcggaactaatggagtagttcacgccataaattttaaacggcgtagcgaggcaggcggaaacgccggatgccattgctttcgtcaccacatacgggcccacggctttcagaccacgcgggctacgcatggcatctgcgccaaagacctggaatttcggggagccgccgccggaacctgcaatcaggccgacacgcgggttattctgatagacttccggcgccagaccggcgtcggccactgcctgctccatagacagataagcatagatggaggcgtcgctcataaagcgcacgactttgcggtcaatgaggccagtggtatccagttttacgttgccccatacctggctacgcatgccggcgtccttcagctcctgagagaaagtgatccctgaacgtccttcacgcagagatgccaggacttcctgctggttattaccgatgctggaaacgatgcccaggccagtaatcactgcacgtttcattcaatacctctgtaattcgcactatttttaagtttcgattggcacaatagcgtacacttgtacgccgaacaagtccgatcagccatttagtacggaaatttgcgccatcaggcacacatcgttaagatcgcgataccgcccgtcagacgagtaacttacgtgaaacaatacgccatacaacccgccacactcgaatttaacgctgagggtacacctgtttcccgagattttgatgatgtctatttttctaatgacaatggactcgaagagacacgctacgtttttcttggcggcaatcgtcttgcggagcgatttcccgtacattcacatccattatttatagtcgcggaaagcggttttggcaccggactcaacttcctgacgctgtggcaggcgtttgacagctttcgttctgcgcacccacaggcgacgctgcaaaggttacatttcatcagttttgagaaattcccgttaacgcgcgacgatctggcgctggcgcaccaacactggccggagctcgcgccctgggcagagcagctgcaggcgcaatggccgctgccgctcccggggtgccaccgcctattgctggatcggggtcgggtgacgctggatttgtggtttggcgatattaatgagctgaccgaccaactggacgccacgctgaatcaaacagtcgacgcctggttcctcgacggttttgccccggcgaaaaatccggatatgtggacgccaaacctgtttaacgcgatggcgcggctggcgcggcccggcgcaacgctggcgacgtttacctcggcgggcttcgttcgtcggggattacaggaagccggttttaccatgcaaaaacgcaaaggcttcggacgtaaacgcgagatgctttgtggagtgatggaacaacacctcatgccgaccctttccgcgccctggttttaccgcagcggaagcgaaaaacgtgaaacggcgatcattggcggcggcatcgccagcgcgctgttatcactggcgttactgcgtcgcggctggcaggtgacgctctattgcgcggacgaccagcccgcccagggcgcctccggtaatcgacagggtgcgctttatccactccttagcaaacatgacgccgccattaatcgctttttcccgaccgcattcacctttgcccgtcgcctgtatgatgccctgcccgtctcttttgatcatgactggtgcggcgtgacacagctcggatgggatgagaaaagccagcagaaaattgcccagatgctgtccctggcgctgcccgccgaactggcctcggcgctcaatgccgaagaggcggaacaggcggttggcgtgacgacacgctgcggaggaattacctatccggcaggcggctggctatgcccggaacaattaactcgcgcagtcatcgcactggcgaccgaacagggtttacaaacgcgctttcgccatacgctcacgtcgctcgttgcgcaggagtcgcgctggcaactgcgctttatgtcaggtgaaaccgccagccatgagaccgtcgtcctggcgaacggccatcagattaaccgttttgatcagacccggccgctgccggtgtatgccgtcggggggcaggtcagtcatattcccaccacccccgccctctcggcgttgcgtcaagtgttatgctacgacggctatctgacgccgcaaaatccgcataatcagcagcactgtattggcgccagctatcaccggggcgacgaaagcaccgtctggcgcgaagaagatcagcgtcagaaccgacagcgtctgcttgactgttttccggatgcgaaatgggccacagaggttgacgttagcggcaacagcgcccgttgcggcgtgcgttgcgccacccgcgaccatctgccgatggtgggcaacgtcccggattaccacgccacgctgacgcattacgccgatttagccgataacaaaacgtcggcggcgcctgcgcctgtgtatccgggtttatttgtgcttggcgcactgggatcgcgcggtttgtgctcagcgccattatgcgcagaaattctggcggcgcagatgagtaacgagccgattccactggatgccggtacgctggcggcgttaaatccaaatcggttatgggtgagaaagttattgaagggaaaagcggtgaagtaatgggtcagtcaatagcggaaggcggcaagcgtcgccttccggcccacggcgttattgttttgccttgtcgaacaaattgtcccacatcgctttgactaacgcctgatcgcgcggcgacagttcgccggcgccgatcgctttctccagactttggctaacgttggcatagaccgcctcaacggagtggtcatcaccgctctccagctcggcaatggctaacgtcaggtggccacgcaggtatccactggcaaaaagctcatcgtcgctggcgtgctctaccatatcgtcaattaatgccagaatgcgtgattcaaactccgcgatcatcttctttcctcattgtaaacgtggcgctggctttaattaagcgcttccggccacgggaactgttccgccttaagttcgggcgtgtgatagtaattctgtagcgctttgatgaagcgggccggacgttcaggaatgccctgctccagatacgccattacctgcgcatgaacccggcgctgaaacgccacgcgatccggctcaatatcgccttccagattgtcgcaactgacgttaaagggataccccgccgccacgcaaaacaaccagtcgaaagcctgtggcttcacctcgacgtcttcaaattgactttgggtctgcgcgtcgcgtccatccgggcagtaccagtaaccaaagtcaaccagttcgcggcgcgccttaccggcgatacaccagtgagaaatctcatgcagcgcgctggcgtaaaacccatgcgcaaagacgatgcggtggtacggtacctgcgcgtcagcaggaagatagatcggttcgtcgtcgcctttaatcagacgggtattaaattcttcggcaaagcagccgttaaaaatctcaattaactgttcgtaatggtgcgtattgttcattaattcatccccaaccagtggaggatctcctgtccgtggctatcataaagtaacctggcgctcattaccgccgagacaataacgatcatcggtctgataagcttttggcctttgctcaataccagacgcgaccccattcgcgcccctaaaaactgaccaaccagcatcacgaagcccgtcgcccagatcactttgccgccgatgataaataacagcaggccgccaacgttggaggtagcgttaagcactttggcatgtgccgtggatttcgccaggttatagccacataaggtgacaaacgccagagcgtaaaacgacccggcggcaggcccgaaaaagccgtcgtaaaacccgacgcatcccccggctatcagcgcgaacggtaatccatacaggcggcgctggcgatcttcctcgcccagcttcggcatcaataaaaaatagaggccgatgaaaatcaccaggataggcaagatctggcgcaaaatatccgcctgcacgtgctgcaccagcagcgcgccgctcatcgagccaatgaacgtcatcagaatattgagcttttgctcggccaggtttaccactttacggcgaataaaatagagcgaagacgagagggagccgccgcacgcctgtaatttattggtcgccagcgcgtttgccggcgacatcccggcggccatcagcgcagggatagtgagcagccctccgcccccggcgatagaatcgataaatcctgccagtacggcgacaaaaaacagcaccaccagcagcagcggggagaccataaacagatcataaaaattgtccatcagagtacatgctcatccagtagcgcctggcaggaaggcggcagcggcggcggtgtcttcttctcaggctttgtggtgccaggttttggcggttcgaaccagctttgcagttcagcgccgcatccatcgcccggcgggggtaaaggttgatcttcgcactccaggctgtcggcagggcagcgtaaacgcacgtgcatatgcgcgcgatgctggaaccaggggcgtactttacgtagccagtcacgatcgtttccggcatcgaggcaaagctgttgtttaatagccggattgacgaaaatacgggtgacgtcattgtcttgtgccgccagtttgatcagactggcgatatccgacgaccagcgcgacggcacgacgtgtttaccgtcgcgggacaccagatctaacgcctgcgggcgcaatagctgcgcctggctccagcgcgttttcggcaactgcaagaaaatatccacatcaagcccggtctgatgactggcgtgtccgccattaaagcggcctccggcaggcatccccatgtcgcctatcaggacggttccgagcccccgttgctgcgcctgatgactcaaccgctggataaacatgaccaagtccgggtggccgaaataacggcgctgatcggtgcgcatcacctgataattatcggactgtaccggcaacgtgtcggcgccgatgatgcatccgttggcaaagctaccgatagactgggcggcgccggggacaggatgggttattttctgccacggcgtcgccgccaggctggcgctactgacaaaccatgccagcagcgcaatcgcggtttttttcatttcttaccagcgtggaatctctgtctttacatccgcattctgtgcccgatggcgcagcaggtgatccatcagcacgatcgccagcatggcttctgcgatcggcactgcgcgaatccccacacacggatcgtggcgccctttggtgatcatttcgacttcttcacccatccggttgatcgtacgtcccggcacggtaatgctggaggtaggtttcagcgccatatgcgccacaatgtgttgcccgctactgataccaccgaggatgccgccagcgtggttgctctgaaaaccctgcgccgtgatttcatcgcgattctggctgccgcgcagcgccaccacgttaaatccttcgccgatctccacgcctttcaccgcattgatgctcatcagcgcatgggcgatgtccgcatccagtcggtcaaaaaccggttcgccaagccctgccggcacgccgctcgccatcaccgtcactttcgcgccgatggagtcgccctcttttttcagcgcgcgcatcagttcgtccagcgcgtcaagtttgtccgcatcgggacaaaagaacggattaagctcaacctgacgccagtctttaatctccagcggaatatcgcccatctgggtcaggcagccgcggatttcgatgccgaacttttccgccaggtatttcttggcgatcgcccctgccgctacgcgcatcgcggtttcacgcgcggaagaacgtccaccgccacggtaatcgcgcaggccgtatttctgctcataggtgtaatccgcgtgtcccggacgaaaaacatctttaatcgcgctgtagtcctgcgagcgctgatcggtgttttcaatcagcaggccaatgctggtgccggtcgtcacgccatcaaacacgccggagagaatttttacctggtccggttcgcggcgctgggtagtatagcgcgaggtgccggggcggcgtctgtcgagatcgtgctgcagatcggcctccgtcaacgggatgccgggcggcacgccatcgacgatacacccaagcgccagcccgtgtgattcgccgaaagtggttacgcgaaagagttgtccaattgtgtttcctgccatcacggctccgttatcgttgttgtcgtttgcgtgttttaatctttataaatgttgaaatgttcacgggccgcgagcaactgcgctttggtcaacataaagacgccatcgccgccgttgtcaaactccagccaggtgaacggcacatccggatactgctccatcagatgtaccatgctgtttccgacttcacaaatcagaacgccgtcatcggacagataatccggcgcattccccaggatacgacgggtcaatttgaggccgtcagtgccggacgccagccccagctcaggttcgtggcgatattcgttcggcagatcggacatatcctccgcatcgacataaggcgggttagtgacaatcagatcgtactgaactttcggcagatcgcggaacagatcggaacggattggcgtcacgtgatggataagaccgtgttcttcaatgttatgctcggcgacagccagcgcatccggcgaaatatcgaccgcatcaacctctgcgtccgggaaagcataagcacaggcgatggcgatgcagccgctgccggtgcacatatccagaatatatttcggctgttggctaataaggccggcgaagtggttattaatcagctcgccaatgggcgaacgcggcaccagcacgcgctcatcgacataaaattcgtggccgcagaaccaggctttattggtcaggtaggcgaccgggatacgctcgttaatgcgacgaatcactcgctcgacaatgcggtgtttttcgctggacgtcagccgcgcggtccgcatatcttccggaatatccagcggcagataaagagacggcaacaccagttgtaccgcttcatcccacgggttatcggtaccgtgtccataccagatattcgccgcgctaaagcggcttaccgcccagcgcaacatgtcctgaatggtatgcagttcacttactgcttcatcgacgaaaattttatccacgtattcctccagggcatgctcgcattaaattcggcggctagtttgccacgaagacagggataaatcagcattgacgcggcgggagaatacgaaaaatccgttttgaccgttcggatatcctccgggtcgggtaaactaaggcaaaagatcagacgagacccacgaatgaaaaagaaaacatcgctcagcgaggaggaccaggcgctgttccgtcagctgatggtcggcacccgaaagattaaacaggatactatcgtccatcggccgctgcgcaagaaaatcacggaagtccctacccgaaggttaattcaggaacaggcggacgccagccactatttttccgatgagttccagccgctgctcaatacggaagggccggtaaagtatgtccgtgaagatgtcagccatttcgagctaaaaaaaatgcgtcgcggcgactattcgccagaactgtttctggatttacacggcttaacgcagcttcaggccaagcaggaactgggggcgctgattgccgcctgccgtcgggaacatattttttgcgcctgcgtcatgcatggacacggtaaacatattctgaaacagcaaacgccgttatggctggcgcagcatccgcatgtgatggcctttcatcaggcgccgaaagagtacggcggcgacgccgcgctgctggtgttgattgaagtggaagagtggcaaccgcccgaattaccctgatgcggaattgccggatggcggcgcaagcggcttatccagcctacgaacagccaacgctgtcgcaggcctgataagcgaagcgccatcaggcagcaaagattaaatcgctttcgccattttcagattgcagggactcatttgccagttgaatgtccccttgccgctttcatcaagcgtaacgttggcaattgcggacgtcgtgaacatcggcggcgtttcgcccggacaaagctcagataccaggtatccgaccagaggtaagtgagaaatcaccagcaccgatccgatctcttcattggccagcgcctggaggtaggcgctgaccagaccgacatcgccacagggcgttagctccggcaggacatccacctgagccggcagattcatacaatcgccgaccacatctaacgtctgttcggcccgaagaaacggactcaccagaacacgttcgatatccactttttgacctttcagccagttcgccatcaggcgagactcgtcacacccacaaggggtcaagggacgaaccgaatcactggcggcatcgagggctgcgtcgccgtgacgcatgataaaaacttgcatattgcaccgcttttgttaaccagtttcaccaacacgcttaccacatgcccctattggctgcggcaaaaatgcggtggccggcattgtgccttatccattcactgaatgaaacgctgttttttacctcaatggcgtaagtatagtcaatccttgattattatttcgccactaaggaggcattcagtgcggattcatattctctttgacctcaatttccctggtcagtttccccattcgtccagaaatgctccctgcgctccgccatgcgcactaattgttcacaaggcgcgtaacgaggaccgtaaagtgcggccaggcgctgtaatgtcgccaccatttcacccggcccgagagcatccatatagcggaacgggccaccgagaaacggcggaaaaccgataccaaacacggcgccgatatcgccatcgcgcgcgctgcgaatcactttttcgtcgaaacagcgcgccgcttcgttaagcattaacatgacacagcgctctgccacctgctgcgcagacaatcgactctgcccttgcacgccaataagcttataaatagcagggtcaacctgttttttgcttttacgccctttttcgccataaagatagaaaccgcgaccattttttctacctttgcgatcgtcattcaaaattgaagcgacaacatttgcaggcgcgctaaaacgttctccatacgccgcctcaagcacaggaataattttagtgcccgtgtcgattcctacctcatccaaaagttggattggccccaccggaaaaccaaattttaccagggcggcgtcaatatgttcgacgcgttcgccttcagtcagcatccgaatcgcctcattgatatatggcgcaagaattcggttaacataaaacccggctttatcactgacgactatcggggttttaccctgttttttcgccagcttaacggtcgtggcgatggtctgcgcggaagtagacgcatgaggaataacctcaaccagcggcattttttcgaccgggctaaaaaagtgcaatccaatcacctgttccggtctggccgcattcgccgcaatatcgccaatcggcagggaagaagtattggaggcaaaaatggtgtgagcagcgcaattttgttccacttccgccaccatctgttgttttaacggcagatcttcaaacaccgcttcaatgaccagatcacgatgactgaaaccacggtaatcggtcgaacctgatatcaatgccaactgtttatcgcgttcgttggctttgatatggcggcggcgtacttttgtttcaagcagatcccagctgtatttcagagcatgattgatcccctgagtatttatatccttaattcgtactggcaaaccgcctttacaggccgtaacccaggcgataccgccgcccattaacccgccgcctaagatgcccacgctgttcagcgggccgggcggcgcatcgctaccgggatcttttttcacctcggtactggcaaagaaaacagcgcgcagcgcctgcgattgaggcgtcatcgccagctcgccgaaagcgcgcgcttccgcgtcatagccgctactgctgccctgcgccagtccggtttcaatcacatcaatgatccgctccgtcgccggataattaccctgcgttttttgcgctgtctttttacgcaccaggcgaaataacagcgcgcgccccagcggccccgccaggatacgttcacggaccggtaatgtccgctgcgccaggcgttcttttttagccagctcgacagccgcttccagtaaaatagtttgcggcaccacatcatcaaccagcccggctttaagcgcctgcctggcgcgaagctgtttacctgtcaggatcatatccagcgcggtactgacccccaccagccgtggaagtcgctgcgttccgcccgatcccggtaaaagccctaactgtacctccggcagtccgagaacggttttaacgtcgtcggtacagatacgtcgatggcaggccagcgccatttcaaggccgccccccagacaggcgccatgaatggcggcgataaccggaacaggcaacgcctggatctccgccatcagttgttgcccctgacgcgccagcgtttccgcttcctgcgcgttttggcagtgacctatcatgttgatatcagcgccagcaataaagttatctgctttggctgagataaaaacaacgccctgcaacgctttattttcccggatctgcttcaggatggcgcgtacctgcgcggcaaactccgctttcagggtgttcaccttttctccagggacatcaatagcgacaaccgcgacattatccagacgcacgttaagcataaaagctgatgtggtagtcattattccgcctccagaaccatcgccgcgccaagaccgccagccgcgcaggccgtgaccaggccaaaacctccgccccgacgccgtaattcatgcaacgtttgggttatcatccgcgcgcccgttgcggcaaaaggatgcccgtaggcgattgagccgccgagcacgttgaatttagcgtcatccacctcccctgtcgcctgcgcacgaccaagcacctcacgggcaaatcgttcgctgcccagcagttgtaagttcgccagagtctgggcggcaaacgcttcatgcatgtcaaaaagcgtcagatcggccatcgtcaacccggcccgctccagcgccagcggcgttgaccaggccggccccaatagcatgtcctgccagacatcaatagcggtaaaggcgtagctgcgcagataaccaagcgggcgcagccccagctctttagcgcgggattcggtcatcataataacggcggcagcgccgtcggtcagcggtgtactgttggcggcggttacggagccatgttttcggtcaaaagcgggacgcagtttagcgtagtccgccagcgtggaggcgccgcgaatgttgttgtcttctgcaaaggggtttttatacggcggcacataggtcgtcatcacttcttccgccagtttaccctccgcccatgcctgcgcggcgcgctgatgtgaacgatgcgccagtgcgtcctgctgttcacgcgtaataccatacgttttcgccatctgttcggcggtatcgcccatgcgcagaccggtggaatactcagcaacggcgggaggcacgggcagcaggtcgcgtaagcgcagacgagaaaaaagcgtcagccgttggcgggtcgtccgggctttattgacatcaaccagtacccgcgccagggctttactcacgcctattggcagtaccgacgacgaatctgcgccgccagcgatacccgcgcgtatcgtgccggccatcaggctttccgccacattcgctaccgcctgaaaactggtggcgcaggcgcggcttacgctataggcatcggtatgaacattcattcccgtacccagcacaatttcgcgcgcaatattgggggcttccggcatttgtactacctgaccaaaaaccagttgctcaatggcatcggctggaatttcactgcgcgccagcagctcgcctaccaccatcttgccgagatcaacagcgggaataccatgaaatgcagtggcctgacgagcgaagggggttcgtaacccactgacaatagcaatgcgatcgccctgacgggtgaccaacggtaaagcctgacgcatagtactcccctgtaaaaaaataaattagtggtctgacctgatcacagtcttaaccaattttttacatttagccaagcagagagaaaagaaagtgggagctaaggcacagtgaagggaaacgacaaaaaaagaaaacgcctccgccagatgatgacggaggcgtcgtgaatgaacggattaacgcaggccgagctggaagatcagcgtttctgcttcgcaggcgaaaacaaaatcaatatccagacgaacgccttcggattcctcggtaaaggttggcgtaatttggcaaggctcagactccacgctacgcgctttttcggttaacgccgccagcgtcccttcagcctctgcgcgggtagcgaatacgcggctgtatgacgcggtgcaatcggagttgtccatgatggttccaacatccatacagcagcaaaccggggtttcatcagcactgcatttactcattgtagatttcctctgtatttgcacccagggtgccagataaacgatggggatattttacgctcccggcattcgcctctccagtcgttaatggtgggaaacgcgttaagtgaccgaaatcacacttaaaaatgatctaaaacaaaaatcgcgcgatcgggtgaccgttaagcccgccgattttgccagccagatctcgtttctaagatcacaattgaaaaaacttataaacatacttgcaacattctagctggtcagacctatactctcgccactggtctgatttctaagtcgtaccgcagaccctacacttcgcgctcctgttacagcatgtaacatagtttgtataaaaataatcaatgaggttatggtcatgagccagaaaaccctgtttacaaagtctgctctcgcagtcgcagtggcaatcatctccacccaggcctggtctgcaggctttcagttaaacgaattttcttcctctggccttggccgggcctattcgggtgaaggcgcaatcgcagatgatgcgggtaacgttagccgcaacccggcgttaattaccatgtttgaccgcccgacgttttcagcgggcgcggtttatattgatcctgatgttaatattagcgggacatcgccatctcgtcggacgttagatgcggataacatcgcgccgacggcctgggtgccgaacgtccattttgtcgccccgattaacgatcagtttggctggggggcttctattacctctaactatggtctggcgacagagtttaacgacacatacgccggcggctcggttggcggtacgaccgatcttgaaaccatgaacctgaatttaagcggcgcttatcgcttaaatgaggcctggagcttcggccttggctttgatgcggtatacgcgcgtgcgaaaatcgaacgttttgcgggcgatttaggccagttggtcgcggcacagaatccggcgctggcgccggtcgcgggtcagattcccagcgacaccaagattgcccacctgaacggtaatcagtggggctttggctggaatgccggtatcctttatgaactggataaaaataaccgctacgcgctgacctaccgctcggaagtcaaaattgactttaaaggcaactacagcagcgatcttcccatcgctataaaccgatttaacctgcctatcccaacggcaaccggcggcgcgacgcagtcaggctacctgacgctgaatctgccggaaatgtgggaagtgtccggttataaccgtgtggcgccacagtgggccatccactatagcctggcctataccagctggagccagttccaggaattgaaggcaaaatcgaccgccggcgatacgctctttgagaagcatgaaggctttaaagacgcttatcgcattgcgttgggtaccacctattactacgatgacaactggacgttccgtaccggtatcgccttcgatgacagcccggtaccagcgcaaaaccgttctatctctattccggaccaggaccgtttctggctgagcgccggtacgacttacgcctttaataaagatgcgtctgtcgacgttggcgtctcttatatgcatggtcagagcgtgaaaattaatgaaggcccttatcagtttgaatctgaagggaaagcctggctgttcggtactaactttaactacgcgttctaatctctttctgaaacggatcaaaaaggtgagcattgcgctcacctttttatttactgccgtttattccgagtcgatctctttgagttcgtcctgaatcgcctgcgcgttcgggttttcctgcggcttgagttttccgccattggcgataaagtcatgacgctggaagtacgcctcacgcaccataatataaggatcggaagactggcgcagcaaaccatcggagtccagcaactgcgcgcgggtttctatcccttcgatagtccattttcctatggacattggccaggtcaaccacgagagcaccggatacaaggtatccgccatatccccgccatcttcacgcagcgtgaagctgccgtagaacggaagttgcatataaggcccataccccacgccataatggcccagcgtactgccaaagcgatgcggttcaacgcgctgcagcttaggattcgccattcccgcgacgtcaataaatccgcccatccctaataaggtgttcaggaagaaacgggtgaaatgcaccataccctgataaggatcgccctgcaggaaatagttcaccatgatcgccggttcttcgaggttgccggtgaaattacttaaaccgttacgcgcaggctgtggaacataatcacgccaggcgaccgcgaccggccgaacaacatacgggtccagcacattaaagttgaagttgtacatggtgcggttaaacccttcaaatgggtctgaacgcccctgctgttctgtaccggaactcgcacacccgaccagcagtgtggttcccagcgccagcgccgacaggcgaagcttcatagatgtctccctgtgaattatggctatcgctgattgccatccatgacggaacgctaccgtatccgcctgtttaggtgtgagcgattttaacagcacgtcaaacgatgtctatatgcgcgatctcattgctttgagcatagcctggtaacgcaacaacgtgacggccctattctaacgaaacagataaaaacgagcgtgatcatttttattttttcggagaatgccccggcctgggtaaatgaaaaaccgctacgctttattaatatgtgttaatcagcagagatcatcatggatagccttaacgacgataaaattaaccggcaaagcagtgacctggaagttgaaagcgaagaaaaacaaagcggtaaagagattgaagtggatgaagatcgtcttccttcccgcgccatggcgattcatgaacatattcgccaggatggtgaaaaagagatggaacgcgatgcgatggctttgctctggtcagccattgccgcaggactttctatgggggcatcactcctggcgaaagggattttccacgtgcagcttgaaggcgttcccggcggctttttactggaaaatctcggctatacctttggttttatcattgtcatcatggcccgccagcaattatttactgaaaataccgttaccgccgtgttgccggtaatgcaaaatcccactctgagtaacgttggcctgctgatgcgcttgtggggcgtagtcttattgggcaaccttattggcaccggggttgcggcgtgggcatttgaatatatgcctatatttgatgaagagacccgcgacgcctttgtcaaaattggtatggaggtcatgaaaaatagcccaacggagatgtttgccaacgcgattatctctggctggatcatcgccacaatggtatggatgtttcctgcagcaggcggggcaaagattgtggtcattattttgatgacctggcttatcgcgctgggcgataccacccatattgtcgtcggttccgttgaaattttgtatttggttttcaacggcacgctgccctggagcgactttctctggcccttcgcccttcccacacttgccggaaatatctgcggcggcacttttattttcgcattgatgagccacgcgcagatccgcaacgatatgagcaataagcgtaaggaagaagcgaggctacgcggcgagcgcctggaacgggagcggaaaaaagcggaaaaacagcgctgagtggcgacggtttaaccagtcaggcggcgctacacttactccggcgaataaaaaacgctatactggcgccgcgttgtccccttagttaaatggatataacgagcccctcctaagggctagttgcaggttcgattcctgcaggggacaccatgacctcttttacccacctctcacaaatctcagcaaccccacaccacacaaggcgttgcagcgtttttgatgtcttatgatttccagcgaatagtgcctataaacataacgaaaagcatccctttaaagtaccctctcgctgttagaacttaaccaaaagttagcaccttcactttccgacagatataggcccagaacttcttttttgccttccagattcagtgccagaacggtataaaccgccttgctctgataacggccatcctcacggtttttataatgaatagcgtccagccagacgacgggataaaccttctccagcgggcgctgttgccactgttttagttcagggataactttatcggtactgcactgacggtggcggttgaaacgctgaaggcataaagatcttcactctcccggccgatgtcctgataactcatctccagcgcaaacagtcgaatgatattgcgctcgatctcgtcgtacagggggtctgaagcttcttcaccagttatggctcaaaagtgccgttacgattgcgcggagttgccagttcaaaactgcctgttggggctttaatggctttttgccggaaccatttttacggtttgcctcaacatcctgagccagatgggaatcaagttcagcagacagggtagactcggttaaatacttgattaatggcgttaagatgccatctttgcccgttaatgcctggccggacctgaagggctttaagtgctttgtcgaaatcgaagggatgggacatgtgccattcttttttattttatgttactaaaattatacagaatttttaacgctccccctccccccagcacttccaccctttcaagtacctctccctgaaaaaaaatgcaaagccttgtaagacgatgcaaagctttacatgtcccgtttttattccaagacgcttggcaatcagcaataccaattgatcgataacatcgatcaatatattaaaactcaatagtttaaaactattaaaaatacaattattgatcgcttatatcgatcaaaccaatttgtagtgctacactccagacctttctgaatctgataattttcataatgttgaagttattcgctaagtacacatcgatcggtgttcttaacatgctcattcattggagagtatttgctttctgtatgtatgggatgcatacgcatcaggcgctgacgaacttttccgattttgttatcgctgtatcgttcagcttctatgctaatgcgcgcttcacctttaatgccagcactactgcaattcgctacatgatgtatatgggattcatgggagcactgagcgctgttgttggatggatggctgaccaatgttctttgccaccattggttaccctcatcactttctcggcaattagcctggtatgcggctttatctattccagattctttatcttcagggataaaaatgaaaatctctcttgtcgtcctagtttttaacgaagaagacacgataccgattttctatagaacggtacatgagtttaatgaacttgaaaaatataaagttgagattatttttattaatgacggaagtaaagatgtgacagagtcaataattaaaataatagccgtatctgatccactcgtcattccgttttcgtttacacgaaacttcgggaatgatgcaagatgcacaaccattttattaatctttttttaaaattgaggtaatttaagttggaacacttaaaatacagacctgatatagatggattacgcgcaatagcggttttatctgtggtaatattccattatttcccatcattattgccgggtgggtttgttggagtagatatattctttgtgatatctggataccttataacatcaataatattaaaatctgcatcaaacaaatcattttcataccttgatttctataaaaggagagtgcttagaatatttccagcattatccatagttcttgtatcatgtcttattgttggctgggtttatttattccaggatgattacaaattacttggtaagcatgtttttagcggctcattctttatatcaaactttactctttggagtgagtctggctattttgattcaaagtcataccttaaacctttactacatttgtggtcactgggaattgaagagcaattttatataatatggccagtagttatattgctatgctttagaagcaaaaaccataacagaaacatagtattatcatgcgcaactatatttataattagctatgcgattagcatttttacaatggcatctgatggcggagctaattactactctcccgcatcaagattttgggagttaatggctggagcgattatatccacattgagatttataggaataaacacttcgttatcaaaattaatgtccctgttaggaattatactaatcgcattatcaataaccatgatagatgaaaagatgtcatttcctggatatatagcaataatcccagtacttggcgcctctcttataatagcatctaatggtaatgatttagttgtgtcgaaattgcttagtgttaggcctgttgttttctttggtcttattagctatcctctttatttgtggcattggcctatttattcattctatcgttcaatatttgctggttcaccagactaccatgaattaattcttcttttattatcatcgttctttttggcgatattaacttattatttaattgaaaaaccactgagaaatgccagaaataaatatatcacagcaatattattagcattatcagtatttgggacaggtttaattggcgcatttatttttcatataaatggagttaaagacagggaaatcaataaatcagcaggtgaatatgcttctgttactgacgtgtacaattattataaatatggagaactactccgtggagggatatgccactcagtacaacttactgctgccatatccaatggatgtataaaaaatggcaagcataatatatttatcattggtgattcttatgcggcggctcttttcaatggactttctcattatatagataataaaggttctgattatataataagccaaatgacagatggtaacgctcctcctctatttgttgacggtaaagatgatttacagagaagtgtcatcactctaaacaataatagaattaatgaaattaaacgtgttcagcctgaggtggttctgctgacatggtcagttcgaggaacaaatggagtacatgataaaaagttagcaattgatacgttatcattaaccataaaaaaaattaaagaggcatcccctgactcaaggattattttcattggaccagtcccggaatggaatgcaaatttagttaaaataatatctaactacctgagtgagtttaaaaaaaccccaccattgtatatgacatatggattaaatagtgaaataagcgagtgggactcttactttagtaacaatgttccaaaaatgggaattgaatatatatcagcatacaaagcattatgtaacgaaagtggatgtcttacaagagttggtaatggtcctgattttatcactgccgttgattggggacatttaacaaagcctggttctgatttcctttttaataaaatcggaaataaaataatcaaatagataggctgttactattacatataaatccaatatagaacctgccagtcatactgtgtaactgccactatattaacggtgatcgctcaggcggtcaccgaactcgataataaagcgactcattgccagcgaccagtcctggatcggcatactccattttttgacgcccctttgaccaactcttttactgcggcggtgatcttaagtatcagcatgggcgacacatcagcgttgtacatctctttgaaggtggcgatgatttcgcgggtagtcatgtcatgcctttggcataaagggataaatctgactgtccatctcgtaatacgcgtctgatgctccttaatcagctgcagttcaaaggtattttcacggtcacgcagcatgttcagcactatctcgccgccatcatacagcaccgtttttaatgagtagccattgtgggagtttgagctcgttttaggagcatttttctcatgcccgagatggtcagccagctcagcattgagcgccgtttcgacggttaatgtcgtcagcatatgggaaaactgactgaggtcggcttcagttttaagacctttagccagttcagccgcaagagctgtgagtttcttttcgtccataattgcctttctcctttgctggagtgaatatataataatcagacaattacataatttttaattacaatctcccaatacttatattttacccccatattcattacacgttcaaagtgttgttaacgttaatctaactaattatccattaggtatttcccctaaagaccttaacgaagccgaattatttttgcatgtgacacaaaacatgagtaatcttttataaatttatctgacacgatattagaactaacgacatctcaactaccatacaatctttatagttaactattaaggatgcggggtctgacagattaccagatggtgtttgttttatgtcaatgagtctcaaaccattaataatgcaaccactttctacaaacaattagttagtgttaaagttttagtatcgattacagaaatatatgtgaatgccttcccatatgtgtaccatagatcaccagaccctgcgcaatcttgcataagaatgttcgatacataacttccccagccatccataccaagaccaacactctatgaaccaatggcaacgagaccatcgactaaatgatttgttggtagttggtagttggtagttggtagttggtgtaccggatattctgatagcgaatagttgcctggtctatctttttcatttccgatatctgcccaaaggttgaagcagtcccacaaaaagtatatggaaagtaactttctgaattgaagtttataacatctggatgaggtccccctctactgttccttgccacgtcttaacgccaaacccgccagatctatatgaggtaaacacaatatcaccggacatgccatacgttcagcaaaaagtcgtcatcggccggttatgaccgatgacatcctgatgtggtctagaagcggtactgcaaccccgcggtaaccgtatagttattattagctatacctgcggcatcgccaccaaaatacgccgtatcaccgctggttttatctatgatttgcgtaccgcccttaccttcttcatatttactgtaagcgaactcagcaaagatttttgcattactggtaatataatatccggcgtcaatagacgcgccataatatcgtgaattttccgttttttcacggaaggtaagtttgcgcatgtagtgttcgtcattatcatgcgcatttacccagtcgctgtatttaaacagtacattacactcaaagtcattaatacgataatcacccgccagcccgatatagggcatttcgaaacgctggctataacctataccgcgcacgccatgaggaaagttaccaatataccgaccattatcataaatataagacccgcctcttgccgtccagctaaaacgggtttcctgatagcccgctgtcacgcccgccttgtagttatcgccctgcaataaccaacctttcacattcaaatcgtattcattagcatagttggcgctggtgtccggatgaattgaacgatcggtccagccaggctgctcactgctcatccagtcatggtcaaccatatgacccgatcccgacgccaaagacgtccagccgcgggcgtccagcgtcatgaacgaatagggttcccatgataaatccccctgcaacgtggcgacattttttattttccagtccagttgactcagcttccgcccggtgtcggtatcataaaccagctccctggatttaccatttaacacccccacagaaagggatgtcgtgacgctatcaggagagacgtccggaataaataaggtagactccgcataaaccgactcagaaaatacggcgatcatcattactgcaatagcatgttttttcatttctcttgtcctcatattcagatgtaatctggagaggtgatgaagttttcatcttgtcaaatcgtcggacaagagtacatttattacgccagagaacttgacgcatttttaccttatattgaagttaagaaatagaatttgatgctcaggtgaataataagcaatctataatcatgatggaatgatttaccattacggtgatgcgacgttatctggctaacgacatcgttgctgttgttgtcagccagattgaaagtaactgtaatatcagaatttataatgctctttacttagaccatattttttcatgcgcagataaagttttttacggggaatttgcagatactccgccacttcattaattcgtccctgatgaatatttaatgcttcggtaataatttgtcgctcatactcttcaacgcgccggtcaagcggggtcggctcctgaagaagcaactgcgggttgaccgtttccgccagcggcagcacgccaacagcaaaaagctctgccgcattagccagttcgcgcacattgcttggccaggcgcgtcgcattattcctttcagtaattcccccgctatttccggcactggatgattgagccgcaggcaggcttttcgaagataatggcgaaataacggttcgatatcatccggtcgctgagaaagagactggcaggcgatttgggtcatggcgaaacagtagtaaagctcggccgcaatctggttagctgccgcctgctccaccagcgaagcgctgccaacgcccaccaaacgaaaaggccgatgctccaggctttgtaaacgcgccagatggtgctgctgttcgcgtgtcagatattcgggatgactcaacaccagcgtacctccttgcgcctggtcgatgaatgtctccaactgcccggcattctccggcgtgagttcatagcgtacaaacggccctttcgcgttacgccccagttgatggagataacgggcgccagtcatacgtccagtgccatgctcaccgtaaaaccatacggcaatgtccgtttccgccagttgttgtaaccgttgtcgaaactgattcatccactcgctgcgcccaatcagttcaacctgtaacgtctgctggcaatattgccgccgtgcaatgaccgaccggcgctggcgtagcgcgtcttcaattaatatcaacagcttgcccggatcgacgggtttttgcagaaaatcccaggcgccctttttcaccgcatcaaccgccatcggtacatcgccatgtccggtaatcaataagattggcagttgatcgtcatcctgatgaaacagcgtcataagatcgataccggaacaccccggcatacacacatcgctcaaaacgatcccctcccaatccgcttctacccactctttggcctcgaaaggatgggtaaagccacgcacgcggtagcctgcctgctcaagcatttgggtgtaggcgtcaagtacatcaacgtcatcatcaatcagcaaaatagaacattcatcattcaacatcatcgacatccgttacagagaattgcagcaccacgcaagcgttacgcgtcagcgtcgacgccagacgcaggtcgcccttcatttgcgccatcagcgacacgctaatcgacagcccaatacccaacccgacagctttactggtagtaaacggcttgagtaaagagggcaacagcgccacaggccagccagggccgttatctgcaatataaacctccagcgcctctccctgcgtctgccatgtcaccgcgatcgccgcatcatgcgaacaggcgtcaagcgcattcgccagcacattcaccagaacctgctgaatacgcacttcatcgccgctaacccatacggtgtcggttggcagtgaaagcgctccctgccgggattggtgacgcatggctaataactcccatgccgccacgaaggtttggcgcagatcaacgggatacaatggcgtttccagctccgcccggcgggtaaactgccgcagcgaacggataatggcgtcaatccggttaatgagcccttccgctttggtgagcgtatttctcgcctgtccgctctgaccttgttcaatcgcgcgtcccgccgtaaataaatacattgaaagcgcattcagcggctggttaatttcatgcgccagcgtggtcatggtctggccgactaccgccagtttcgccgtctgaatcaactcatcctgcatggcgcgcaggtcggcttctatctctttgcgctcggcgacctcttgttcaagctgcctgcgttgcatattgagctggcccagcgtatgacgtagcaaacgggctatccgtcctagctcatcgcgcccgtaaaccgggatagtcgagtcggttctccccagccctatctgtaccacagcctgattaagcgcggtaaaacgctttaccagccgggaacggataaaatagtggttgagtccccaggccagcagcaatgccaggagcgtcgccactaaaataagcccgccgctaacgcgaacaatctgttccaggcgttgattgaacatctgcatttgctggtgactactacctaactgcgcctcaagcagcgtgcgaaagcgccctagcgtagcctctctggcgcggctggcgtccagtaaggctttttgcgccgcaacataatcgcgcatggtatcgggcatcttattttttaccatcccgatttccaatagttcgtcgatggtttgccgcagcgtgatcgtactgggccagtcatccagcgcacgaatattctcatccgccgttttttttaggttttccagatagcgaatatgggtctccaccagcatcccgtcattattgccggacttgagctcattcaatctgtcgcgcaggtcatcaacaatctgattttcaattcgcgccagggtatatacctgctgctgctcgttctgcacctcgcgcgaacgttgcaaatactgcgctgcatcgccctgattcgcctcaatttgatcgagtagcgtcccttgctgccaggtaaaatcctgtaccagcgaatttagctccgtggtgaaatcatcatggagccagtcgatgcgagcggaaagctcactgactttctcccgcaccaaaaacatgttgtagagggcgttgtccagctccgccagcaaggtccggctatcctgtaaaatgacggccagttgccggcgctcagcaagctgaagcccctggctgagacgctcaatcttatccagatgctgaataatctgcgtacgtaactgcaaacgtaccgtcgtgttcggcgccagcaaaaattcattgagttgatccacagccagattcaggttcccctcaattaaaaaagcggagtggatgcgaggaaaatattcatcaagcgaatagcgaacctgcgaactttgctcatgccaggaataaaggctgaccatactgacaatcagcgtcagtaatgcgcccgttaaaaatgcaccccgtaaactgttgctgatactgagctgacgaagccgttgcaataatctccccttcatttcagctcttccagtttgtgaatcgctagccgctgattgttcagaaaccagatctgccactccatcattttttgttcggcaaagcttttattatcaaactgcgccagccaggtttcatcctcgctgcttgccgcatccaccgggacgctggtcaataaggctctgatttcaggtaaggggcgtttaagccgcgtttctgcgctatgcaacgctcgccatgcatctttaagctgcgcgagacgaaaactgatcgcggtatcaaacatgcgttgtaccagttgctgacgcttcaggatcagacgatagttcaacggcggctgggccatcaaacgctgttgttgcgcggcgcgaggattatcggcgctaagcggtgcgacgggatacttaccggtattcgcgtcagccagtatcctttgccctttcggacttaataagtaatgaataaaagcacgcgcttcgtctgcatgacggctgtttttcaacaccgcgacgtaagtgggcgacaccgcagaatacgggaaataggtaaaagcaagattaggatcgttaagtagcaaattagcatagttatcaatgaccggcccggcaacgccaagcccgcttttgattttatccgctacgccgaaactgcgagaggaaatcgtgaccaaattacccgagattgccagcagcgtcgcccatcctgccgtccagcctttttgctgcaacagcgactccaccatcaaatgattcgtgtctgaacgtgacggactgctcattaatagagcgccctggtaactgggcaggcccatatcctgccagtcagcaggcggcggaagatggcgcgcagcgagcgctgaacggttgatcaatagcccaaatccggataccgctaccgccactgaagttgagcggatagaacgcggcaccagcttctggctggcggcaggcgcgctatctaatagcgccagcttttggtgctcctgaaggtgttgcaacagcatgggggatgacgtcaggatcagatcgacattttccgcattcgccgtatcaagtaattgctctaaagaaccgctggtacggttgagcgtacgaatcatgacggaacccggctccgtctgccagcgctggataatccaggcggtcgcgctgggtgaaaaggtcgttgccatcaccagctcgcggctgtacgcctggcaagaaccgaacattgccgccagccatagcgtaaaagcgcccactctggcgaaacgactacagcatgagaaaagtcgatttgtgatcccgttcataaatatcgatatcacataaagaaaatattgagacaaaacttacccttttatttctgttggcatccagaacaacgttatttgaataataacgggtccgtcgcccgaaaacatcaataaagcgtatcagatcactggcagcaaatttgttaatatccgcacatgctaacgataaaacggccatgccaataattaaagtttcaccacccccttcaggatgggtcaaaaataacctttaaattcacccaattgagtcaattttgacacatttcttcgacttgaattttattgtcactcctttcactctaccgacaaaacctcctgatgttcatctcactataaaatacaggtgactccatgttaacaatattaaaaacagggcaatcggcgcataaagtcccaccggaaaaagtccaggccacatatggtcgatatcgtatacaggcattgttaagcgtatttctgggatatctcgcttactatatagtcagaaacaatttcacattatcgacgccttatttaaaagagcaattggatctcagcgctacgcaaatcggcctgctgagtagctgtatgcttattgcttacggaatcagtaaaggcgtaatgagcagtctggcggataaagccagcccaaaagtcttcatggcgtgcggtctggtactctgcgcgattgttaacgttgggctgggattcagtagcgcattctggatatttgccgctctggtggtcttcaatggcctttttcagggcatgggcgtcggcccctcgtttattactattgcaaactggttccctcgtcgggaacgcggacgcgtaggcgccttctggaatatctcgcataacgttggcggcgggatcgtcgcgcctatcgtcggtgcggcttttgcgatattgggcaacgaacactggcaaagcgccagttatatcgttccggcctgcgtcgccgtcatttttgccttaattgttctggtcttgggaaaaggttcgccacgcgaagaaggtcttccctcactggaacagatgatgccggaagaaaaagtcgtactgaaaacgaagaatacggcaaaagcgccggaaaatatgagcgcatggcaaatcttctgtacttatgtgctgcgcaataaaaatgcctggtatatttcgctggtggatgtcttcgtctatatggtgcggtttggcatgattagctggttgcctatctatctgttgacagtaaaacacttttcaaaagaacagatgagcgtcgcgtttctctttttcgagtgggcggcgattccctccacgctactggcaggctggctgtcagataaactgtttaagggccgcagaatgccgttagccatgatttgcatggcgctgatttttgtctgtctgatcggatactggaaaagtgaatctttgctgatggtaacgattttcgccgccattgtaggttgtctgatttacgtcccgcagttcctcgcgtccgtacagacaatggagatagtccccagctttgccgtaggttccgccgtcggtttacgtgggttcatgagctatattttcggcgcctcgttgggcaccagcctgtttggtgtaatggtggataaacttggctggtacggcggattttatcttctgatgggcggcatcgtgtgctgcattctattctgttacctctcccatcgcggcgcgctggaactggaacgccagcgccagaatgcgttacataatcaggactcactgcagcttgcggacgcgcaataaacgattagccttcccggggaacagaagcgccgacattgtcggcgctatctattcgctgacatcgtgtatacccaaaataattcgagttgcttaaaagcggcaagggagtgagtccccaggagcatagataacgatgtgactggggtgaacgacaaatctgccgggaacagatttgaacgtcgcgtgcgacggccgtcagggcgaggcccatcgatgggccgagtaatccgtagccaacacatcagcaacttgaagtatgaagggtatgtactgactaacgcttaccgtatcccaccataaagcgaataattaacccacatgccggtgcgagaaaaagcaataatccgctaacgatgtcatcgccatcctgcaaccatacattgagtaaataaatcagcgcggcaaggataaccattcccgtaaaagaagaaaccgcagaaaaagcccccatcacctgaccgatatagccactcacggcaagtatacttattgcaagaaatgtccataaatagatcatctataatacctcctgtctatggcaaggcttccatatagccttacggtccctctcacttctcctttaagataaaccttatcagcccgtcatttccataacatttatctcacattttatttttttaatcatttttcaatgaccttcgtctgaaataaaattatcactgtaaaaacaatgcattaaaaataatgattagcttatttttgctacgggagaaatatttacgcttcttgataaagaatttctgggcgcgagtaaataactggtggtacattagcctgcctggcgttcatgccctcgtggtttagtactgacttagttttacactccttacgggaaccattgtcgtacatgatggcctaactatacgtaaatcattcaagttaccctgatgagcttactcaagtaagtgcttcggataagctaacgcaacttgaaggatgatgcgtatttcagagtgtaccgctgcggataatgactcttctgcgatacattattttcgtatctacagaaggtattttatgtttcctcaaagcaaattttcacgcgcgtttttgcacccgcgctactggctgacgtggtttggcgttggcgtcctctggttactggtgcagcttccctacccggttttgcgttttctgggcacccgcaccggtaaactggcgcgccccttcctgaagcgacgtgagtcaatcgcccagaaaaatattgaactctgttttccgaccctctcccgggaagaaagggaaaaactgatcgccgagaatttccactctcttggcatggcgctgcttgaaacgggcatggcctggttctggcctgataaccgggttcgcaaatggtttgatgtggacgggctggacaaccttacccgtgcgcaggagcaaaatcgcggcgtaatggtcgttggcgtgcattttatgtcgctggaattgggaggccgggtaatgggtctctgccagccgatgatggcgacctatcgtccgcataacaatccgctcatggagtgggtgcagacgcgcggtcgtatgcgctcaaataaagcgatgatcggcagaaacaatctgcgcggcattgtgggcgcgctaaaaaaaggggaagccgtttggtttgctcccgaccaggactacggccctaaaggcagctcctttgcgccatttttcgcggttgaaaacgtcgccaccaccaacggcacctatgtactgtccaggctgtctggcgccgccatgttgaccgttacaatggtaaggaaatccgataactcgggttatcgtctgtatattacccctgaaatggaaggttacccggcagatgaaaatcaagccgctgcctatatgaataaaattattgagaaagagatcatgcgcgccccggagcaatatctctggatccatcgccgtttcaagactcgcccgttgggggaagcgtcactctacatctgaaaaaggccgcaaggccttttattttggcatttcgcattgtcataatattcatatcgtaaattactcattcctgcttttagcgataaatctcctgtttacaggcgattttttactgtgtcggcggcgtcgctcaatagcgattcatcactgtcagaaattaaactgtcgccgattcccgacacttgtaagttactaaaagtaaataagaaaatgcctcttgtttcacctcatttttaggcgtacattagcgccgtctggagcgatgacgcgcagaattctgaggtgatgcaggcggtagaaacacgaataattctcaatttcgtattgtccggcatcaactctctataatcaggtaagtgtaagttcatttaggcgtacgacaggtacgcggagagatgaaacgtgaaatatttctttatgggcatttcatttatggtcatcgtttgggccggtactttcgccctgatgatttaaaagtacaatgcaaagaaaaacaggagccatggggctcctgtttgcttttctactccgtgctcgcttcaacgggttttggatgtgacggcagcacgccatcggcgcggaacatcgctttaatccctctgacggcctggcgaatgcggtcgcgattctctattaatgcaaagcgtacatgggtgtcgccataatcaccaaagcctatccctggagaaacgcaaaccttcgcctcattcagcagcttcttggcaaactcaagcgatcccatcgccgcatattgctccgggattttcgcccagacgtacattgaggctttcggcatttcaaccatccagcccgcctcatgcagccccttcaccagcacatcgcgacgacgtttatactgctcggcgatatcgcgcacgcactgctgatcgccttccagagcggcgatagccgccacctgaagcggggtaaaggtgccataatcgtgataacttttaatgcgcgccagcgcgctgaccagggttttattgcccaccataaacccaatacgccagcccgccatattatagcttttcgacagcgtgaaaaattcaaccgccacgtcgcgcgcgccgggcacctgcataatggatggcgctttccagccgtcgtacacgatatcggcatacgccagatcgtgcaccaccagcacatcataacgtttagccagagcgaccactttttcaaaaaattccagttcgacgcactgggccgtagggttagacggaaaacccaaaatcatcattttcggtttcggataactttcgcgaatagcgcgctccagctcgttgaagaaatccactccctctaccaatggaaccgaacgcacctgcgccccggcgataacggcgccatagatatgaatcgggtaactggggttcggcaccagtaccgtatcgccatgatccagcgtcgccagcattaaatgcgccagtccctctttggaaccgatggtcacaatcgcttcggtttccggatcgatatcgacatcataacgttcctgataccagtgagaaatcgcgcggcgtaaacgcggtatgccgcgggacgtggaataaccgtgcgtatccggacgctgcgcgacggtgcaaagtttttcgacaatgtggggaggggttgcgccatcaggattacccatactgaaatcaataatatcttcaccgcgccgacgcgcagccattttgagttcagcggtgatgttaaaaacatagggcggaaggcgatcgatacgcgtaaagcgacgttcagggcggaagtcagccataatatcctcagattaacgttagcgcccggaccgtccgagcgacgctgccacgatggtggctcctttagaaaatagcctgaaaattttcttcctgtcgagaggctaatgaaaatattttttagcgacgaaaaaagaggaacaagcgtaaaaatttaccttttaagcatgtcagttatagcatcaaacaaatcatattattaacaacttgatatcattgaatttacctaatgtgttacagccgacgataatttcctgtcaataaaccttatctcaaataatccccttttgattttgtggtttttcctctttaatcaaaacccttactaacgctaaaggtattcaatcatgtcatattgcggtatttttcagggacatttccccgaaaatgaggatcctttccagcaagatgccgcgatgaaaccgtaaataaggcagcgaaccggatacgtatagtaaaataaatccctgttttcgcctgactaaccgccatgacgtgatgactcaacgcgctggtgtttgacctttcgctcagcaagagtaaagtgaaataattcagtcagttgaagcattcatgcacaggaaaggcaatgaaaaaaaccgcgtgaggcacgcggtttgagactgacaagagaatgattaattgcctgatgacgctgcgcttatcaggcctacagatgacacacttttgtaggccggataaggcgtttatgccgccatctgacttatagaatatggcctaatgtctggcgcagatgcgcgccggagcctaacaagccagggttatcatggacaatcagatagaccggaataccgtgtacataatctttaaagcggcctttatcttcaaagccaccacggaagccggacgctttaaaaaattccaggaagcgcgggacaataccgccagcgatataaacgccgccaaatgtccccatggttaacgccagatcgccgccaaatcgccccatgatgacgcaaaagagcgacaacgcgcggcgacaatcgatacagctatccgccagggcgcgttcggtaatatctttcgggcgcagattttccggcagacggttgtcggacttaacaatcgcccggtaaagattcaccagccccgggccagacagcacgcgctcggcggaaacgtggccaatttcggcgcgcaatatttccagaatcatagcttcttcttcgctattaggcgcaaaatcgacatgcccgccttcgcccggaaggctaatccaacgcttatccacatgcaccagatgtgccacgcccaagccggttcccgcgccatacaccgcaataggtttgccgtctaccggttcgccgccgccgaactgaattaaatgctcttttttcagcatcgggatcgccatcgacacggcggtgaaatcgttgatgatttccagatggctaaagccgagattttttttcatttccgcaatagaaaaagcccaggtatggttagtcatcgctacccagtcaccggtaatcgggcaggctatggcgatacaaccatcttccacgctgacgctatgctcatcgagataaacgcgcaccacggcctcaagactgggataatccaggccggaatacgttttggcctgcgagatttctccactggcgatatcacacagggcaagacgcgcattcgtgccgcctacatctcctactaaagcatactttgtcattcttctactgctccgctaaagtcaaaataagtctttgtcacactgtaaattcatgggggcataacaacaacggccatcaggctgactgcctataaatatagatcttcatcacagaattactttcttgtttcagcaccaattgcagcaatgccgtcgggcaggctgtgcaaaataggtatacgaccccgtgtaaggaagagattatgttccacccgcgtgcccgaacgatgctgctgctgtcgctccccgcgctgattattggcgtagcgtcaagcctggttttaatcgctgcgatgaaagtcgcgtcggtttttcagcaatttctttggcaacgactgcccaccagcatcggcatcgcttatgattcgccgttctggatagtgggtatgctcacgctaaccgggatcgtggtgggtttgattatccgttacagtcccggacacgctggccccgatccggccatcgaaccgttaatcagtatgccggtctcgccatctgcgctacccgggctgcttctcgccttaatcatcggccttgctggtggggtaagtttggggccagagcatccgataatgacaataaatatcgcgctggcggcggctttcggctcccgcctgtttccgcgtatcacggcgttagactggacgattctggcctcagcgggcaccatcggcgcgctgttcggcacgcccgtcgccgcagcgctgattttttcgcaaacacttagcggctctaacgatattcccatgtgggatcgcctgtttgcgccgttaatggcggcagcggcggggtcactcaccaccagtctgttctttcatccgcatttttcgttacccatcgcccattacacgcagatgcggctggtggacattgccagcggagcgatcgtcgcggcgatcgccattgccgccgggatggtcgccgtctggtgccttccgcgtctgcatgagttgctgcaccgcctgaaaaatccggtcctgattctcggcattggcggttttatactgggcatcctgggcgtcattggcgggccgcttaccctgtttaaaggcctggacgaaatgcaacaaatggcgtttagccagacgttgggcgcgggagattattttaccttagccgtcgtcaaactcgccgcgctggtcatcgcggcggcgagcggctttcgcggcgggcgcatttttccggctgtgtttatcggcgcggcgctggggctcatgctccatgcccatgttgaggccgtacccgcggcgattaccgtctcctgcgcgattcttggcttagtgctggtagtgacgcgcgacggctggctcagtctgtttatggcggcagtcgtcgtaccggataccaatctgctgccgctgctctgcattgtgatgctccccgcctggctattgctggcgggaaaaccgttgctggccgccaaccgtcacgaaccctaatccggcgcagcgggggccattatcccccgttgcgggcttccagcgcccgggtcacggtacgcagtaattccggcagatcggcttttggcaacatcacttcaataaatgacagacgttgtgggcgcgccagacgttcgaggacctctgccagttggatagcctgcgtcacccgccagcactccgcctgttgcgccgcgtttagcgccggtggtatctgcgtccagttccagctcgcgatgtcgttataccgctgggccgcgccgtgaatggcgcgctctacggtatagccgtcattgttgagcagcaggatgaccggcgcctgcccgtcgcgtaacatcgagcccatctcctgaatcgtgagctgcgccgcgccatcgccgataatcagaatcacccgccgatcgggacaggcggtttgcgcgccaaacgcggcgggcaaggaatagccgatagacccccacagcggctgtaccacaacttccgcgccgtcaggaagcgacagcgcggcagcgccaaaggcggcggtcccctggtcgacaaggataatatcgccgggtttgagatactgctgtaaggtttgccagaagctttcctgggtcagttctcccttatcaatccgcactggctgtccggcggaacgcgtcggcggcggcgcaaaagcgcattccaggcacagttcgcgcagcgtagacaccgcctgcgccatcgggaggttgaaccaggtttcgccgatgcgcgacgcgtaaggctgaatctccagcgtgcgttccgtcggtaattgttgggtaaatccggccgtaagggtatcgacaaaacgggtgccgacgcagataaccctatcggcgtcctctatggcctgacgcacttctttgctgctggcgccagcgctataggtgccaacgaagttcgggtgctgttcatcaaaaagccccttccccatcagtagtgtcgcatgagcgatgggcgtttccgccatccagcgctgcaacagtggtcgtaaaccaaaacgcccggcaagaaagtcggccaatagcgcaatacgccgactgttcatcaggcactgacgggcgtggtaacgaaaagccgtctccacgccgctttgcgcttcatgcacgggcaacgccagcgcctgcgtaggtgggatggccgtttttttcgccacatcggcgggcaacatgatgtatcctggcctgcgtgcggcaagcatttcacccaacacgcggtcaatctcgaaacaggcgttctgttcatctaatattgcgctggcagcggatatcgcctgactcatgcgataaaaatgacgaaaatcgccgtcaccgagggtatggtgcatcaattcgccacgctgctgcgcagcgctacagggcgcgccgacgatatgcaagaccgggacatattccgcgtaactgcccgcgataccgttaatagcgctaagttctcccacgccaaaggtggtgagtagcgctccagcgcccgacatgcgcgcatagccgtccgcggcataagcggcgttcagctcattggcgcatcccacccaacgcagggtcgggtggtcaatcacatggtcaagaaactgcaagttataatcgcccggtacgccaaaaagatggccaatgccgcatcctgccagtctgtccagcaaatagtcggccacggtataggggttttgcatgacagctttccttctgacgttgatattatgttgagtattaaggaatgccgatggctgtccagcacggtggggatgaaagcctggaaaacaatgtttacagcggcaaacagtaaaagccggataccgcctggcgagtgtaaccgtatacactatttattcacgccacagggggaaaggtcatgatttatcagcccgatgagaatcgttatcacacaatggagtatcgtcgctgcggacgcagcggcgtcaaacttcccgctatttcgctggggttatggcacaacttcggcgatacgacacgggtagaaaatagccgggcgctgctgcaacgcgcgttcgatctgggcattacccactttgatctcgccaataattatgggccgccgccgggctccgcagaatgcaattttggccgcattctgcaggaagattttttaccgtggcgtgatgaattgatcatctccaccaaagcgggctacaccatgtgggatggcccttatggcgactggggttcacggaaataccttatcgccagcctcgatcaaagcctgaaacgtatggggctggagtatgtcgatatcttttatcaccatcgtcccgatcccgaaacgccgcttaaagagacgatgaaagcgttagatcaccttgtgcgccacggcaaagcgttgtacgtggggatctctaactatcctgccgatctggccagacaagctatcgatattctggaggatctcggcacgccttgcctgattcatcagcctaaatattcgctttttgagcgttgggtagaggacgggctgctggcgctgttgcaggaaaaaggcgtcggcagtattgccttctcgccgctggcgggcgggcagctcactgaccgttatctgaatggcattccggaagattcccgcgcggcgagcggaagccgtttccttaaaccagaacagattaccgccgacaaactggaaaaagttcgccggttgaatgaactggccgcgcgacggggccaaaaattgtctcagatggcgctcgcctgggtgctgcgtaacgataacgttacctcggtactgattggcgccagcaaaccgtcgcaaatcgaagacgccgtaggaatgctggccaatcgccgtttttcggcggcggaatgtgcagaaattgacgctattctggagggccggttttagcaaaaaatgctctccttcatgatttaagagttaaggcgatgaaacaaatctttactgctttgtaatattgcattaacaggccggcgacggctcgatcgtgaaggagagaaagtatgttcaggtcactgattctggcggcagccttgctggcttttacaccgcttgccgcgaatgcgggcgaaatcaccctgttgccctcaataaaattacagattggcgatcgcgatgattacggtaactactgggacggtggtcgctggcgcgaccgggattactggcacaaccattatgaatggcgtaaaaatcgctggtggcgccatgacaacggctatcatcgcggctgggataagcgtaaagcgtatgaacgcggttatcgggaaggctggcgcgatcgcgacgatcatcgcgggcgaggccggggtcacaaacatcatcactaagcctcctgctgaataacagcccgatgacgcccacgcatcgggcctgctatctttctgtctttatgacaatcccatcaccgttccaaccagcaaccagatattcagggcgacgaccagcacgacaattatccagccaatctgttttactcgccgcgtgttcaccagctcgcccattagcgtagcgttactggtgaaaatcaggagcggcaccagcgccagcgcaataccaaaactcagcagcacctggctcatcaccagaattcgggtagggtccagccccatcaaaatcacaataaatgagggcagcatggtaatgctgcgccgtacccacagcggaatgtgaaaacggacaaacccttgcatcaccacctgccccgccagagtccctaccacggtggaggaaagccctgccgctaccagactaagaccaaacaccgttgccgccgcatggcttagtaacggttccagcgtcaggtatgcctgatcgaggtcggcgatgccagtgtggccgctaaaatgaaacgccgccgcggcggtcgccatcattgccagattgacaaaaccggcaatcgtcatggcaatagcgacatcccatttcgttgctgagtaccgttgttgccgcgttccgccgtgcagatgctgtgttaatgacgagtgcagataaatcacgtgcggcataatcgtcgcgccaagcacgccggcggctaagaatacggcttccgggttcggtagcgccgggataaccattcctttgccaagctgcgccatatcaggctgagagaaaaacagctccacaatgtaagcagcggcgacaaaaagcagtaaaccgccgatgactttttcaagcggtttttgaccgcggcgttgtaacattaaaatcagaaacgtcgcgataccggtcaataccgcgccctgtaataaagagacgcccaggatcagcttaaaacctattgccgcgccgataaattcagctaaatcggtggccatcgcgatgatttccgcctgtacccagtaaaaccagactaccgggcgcggataatggtcgcgaatttgctccgccaggttcttgcccgtggcgattccgagttttgccgagaggatttgaatcagcatcgccatcaggttcgcccagaccaccacccagagtagctggtagccaaagctggcgccggcctgaatattggtcgcgaagttaccaggatcgatataaccaatcgcggcaatgaacgcaggtcccattaatgcgagccttagcttgcgcgccgcccgtccgctgctattctctacgcgattgtcagtcatcttttgcctcaaaaacatagcctttgctatgtttcatgctatgtttattgataatgattatcaagtgcatttcaatgggtacgggtgattactttgatagtgtgaaacgatagaccgatacgatgacgacctgtatcagaacagtttggcttaacattacaagattagcacactgatataacttttcattttcatattcagtacagtaaaagtgtattacagatcactaattttgaatctcgtcacaggtccttattatagtgtgtgttggatctcgttttctttacggctgttgcatagaatgtgcacgaaaattaaacctgcctcatatttggagcaaatatggaccgcgtccttcattttgtcctggcgcttgccgttgttgcggtactcgcactgctggttagcagcgaccgtaaaaaaattcgcattcgttacgtcattcagttacttgttatcgaagtattactggcctggttcttcctgaactcggatgttggccttggcttcgtaaaaggtttctccgagatgtttgaaaaactgctcggatttgccaacgaagggacaaacttcgtcttcggcagtatgaacgatcaaggtttggcgttcttcttcctgaaagtattgtgcccgatcgtctttatttccgcgttgatcggtattctccagcatatccgcgttctgccagtggtcatccgcgctattggtttcctgttgtccaaagtaaacggtatgggcaaactggagtcttttaacgccgtcagctcgctgatcctcggccagtctgagaactttatcgcttataaagatatcctcggcaaaatgtcccgtaaccgcatgtacaccatggcggcgaccgcaatgtctaccgtttccatgtctatcgtgggcgcgtatatgaccatgctggaccctaaatatgtggtcgcagcgctggttctgaacatgttcagcacctttatcgttctgtcgctgatcaacccctatgtcgttgatgccagcgaagaaaatattcagatgtcgaacctgcatgaaggccaaagtttcttcgaaatgctgggcgagtacattctggcaggttttaaagtggcgattatcgtcgcggcgatgctgatcggcttcatcgcgctgatcgcggcgctgaacgcgctgttcgcaacagttaccggttggttcggctacagcatctctttccagggcattctgggttacatcttctacccggtcgcatgggtaatgggcgtaccgtccagtgaagcgctgcaggtaggaagtatcatggcgaccaaactggtttccaacgaattcgtggcgatgatggatctgcagaaaatcgccgctaccctctctccacgcgctgaaggcattatctccgtcttcctggtgtccttcgcgaacttctcttccatcggtattattgcgggcgcgattaaaggcctgaacgaagagcaaggcaacgtggtttcccgttttggtctgaaactggtttacggttctacgctggtgagcgtactgtccgcctctatcgcggcgctggtactgtaagtctgcgtttaatgtagaaaccggggagctatccccggtttttttatgccacttatttacctaacgggcgcgggcggccaatcagatatccctgcaaactgtgtacgccaagctgcaatagcagatcgcgctgcgcaggcgtttcaacaaactcagccacgacgctcaacgatttcgctttcgctaaatcagtgatggatttcacgatcatcgcatccagggagtccgtcagaatatcttttacgaaacaaccgtcgattttaatgatgtccgccttgaggcgttttagccgttcatagtttgcatagccggtgccgaaatcatcaatggcgatttttaggccaaacttacgcagctggttgatattgtgcatactgatttcggaatgagagaaggcctgttcttcagtaatttcgatgatgaccgaagcaggcgggacgccatagcgtttaaaaagctgcataatgcgcgacgccgtctctttttgcagcagcgtcagcggcatcaaattaaccgagaaacgcgccccctgctccgccgaaggatgcgcggacaaccattgcaggagcgcttccatcacctgcatatcaaaccgtacgctcaggttaaactgggcgataagcggaatgaactgattgggcatcatgataccgtcgtcgcaccgaagccgcgtcagaatctcgtcatacccttttccctgcgagtcgcgaatgggttgcgcatacaaaaccagcgcgccgcgctccagcgcctgacggattttctgcaaccgcagcacccgttccgtcgtctgcccggaagcggcttcaatactctgggtcagtgcaagcacccgacggtgcgaacaggattgctccgccagccagcttaattgccccaacagcggttgcaaggtttcctggcgaccatcgaatgttccccacgatgcgccgtattccatgtccagaccggtattgttccagtaaattttgcggttattaagcacattgagcatatattgcaggcgggcttccgtctccggtcccgtcaataccagcaataactcactgcccggcagatggaaaattttctccttttccagcagcagcggctgcaacacgcgaaacacctcgcgttcgcaatgcacgcgcatctgcataccgtaatgacggctcagaaattccaggttttccatgcgtagataacacacgctttgcccggcatcctgtaaaagaaactgctccagcgcacgcaggttaggcagttgcgtcaacggatcggttaatgcctgcgagtgccactgtcgattcaaccattcgctacgctgattaatccgcgccatgtacaacaaacaaatactaaaagaaatgagaactgaaaggataaatgccagcgaatattctgagcccacgccctgcagaaaattgcggttatagctaagcaggaatagcgcagtgagagcccaactaaaattcaacagcggatagctgattttccccacgccgatggtaaatccaatgaacagaactggcaccagatagccagcaatatactttgtctcgaaaggcgtacacagcaccgctaatagcgtcgccagagtggcaaaccagagaagcgtaaacaggcgtttttctttggcgagataaggagcgacatccctccgccagaaaatacgaatatagtgcgggctgactatcatccgcagcggataatagaaaaagagggtaaaaataagcgcggcagaaatcagactcaataaatcaacaatcgagaaaatagcggtgccggtgccaaagaaggtagagattgtcaccgggaaagccaggtagtgccccgccagatgcatactgatttttatgccaaacggcgtcattaaccctaaccagaaaacgcgtagccagatgccttggttgggtattccgtagcgccagcgcgcgcccagctgccagcgtacgatagcgcaaaccagcaacacgggaaacgtctggcaaaatagcagcaccatcgcctgtggcagaggtaaatgaaaattccattcattagtcaacatcattccgcctaccatcggcgcgacgccacggcggccaaataaaaacagcacggaaaacatgacgcagagcggtagccaggccagaaagatatagctggaatcaattgtggcgcggggagaaatgagacgagatagcagaatagccggaacggtcaggcagaaggccagtaaaaatatttttatattttttaatacgttacacttatccggcattgctttaatgctcacatcattatataaggcgcatgaataataagtatattcgcattatgaagcaatctaacaaaagctcatattgaccgcaaaagcagcggcaaacaaacgcacctgaagagcagctcagaggccataaattttgtgacaaaaagcaaaaacccccgcttttcagcgagggtttgaatgttggtggagctaagcgggatcgaaccgctgacctcttgcatgccatgcaagcgctctcccagctgagctatagccccatagtgcttttacgtatacgccaaatttatcgggagtaaatttggtggagctaagcgggatcgaaccgctgacctcttgcatgccatgcaagcgctctcccagctgagctatagccccactacgtaaagcttgtcgagttgacgggcggcatcatatgaattccctcggcatgtgtcaacggcaaaatgaacttgccgaattcaatcgctgaaaaagcattcaaataaaggacattgcggcacaactcgcattcagtagttaaacacgtcacggtttcgactaaaatggtgctataaaatgaaccactaattaaccccacgactattcagggaatcgttatgttcaaggaacggatgacgccagaagaactcgctaatctcaccggttacagccgacaaaccatcaataaatgggtacggaaagaaggctgggcaacatcgcccaaacctggcgtccagggcggtaaagcccgtctggttcatgtaaacgaacaggttcgtgaatatatccgcagcgctgaacgttcagttgaccatcacgcagacacattcacgcctgccagcaacgcatcgcttgaagcgctgctcatgacgctcgccaaagagatgacctcatccgagcagaaacagtttacctctctcctcgttcgtgaagggattaccggtttgttacaacgcttagggatacgcgatagcaaataatatgaaaagattacgcagtaaaatgaccactgaagagctggctgaatgcctcggcgtggccagacaaaccgtcaatcgctggatcagagaacaacactggaaaaccgaaaaatttcccggcgtcaaaggcggacgcgcaagactcatccatattgatgccagcgtgcgggagtttattctcaatattccggcttttcgcaaactgcctgcgttttatcaggcggaagaggctttcgcagaatatgcgaacgcggcgcacagtcacgcttatcgacaaattattgatgccgttgaaaatatgtctgctcaggaacaggaaaaactggcgctgtttttatcgcgggaaggtattcgcggatttctgacgcgtttaggtatcaatgaggcggactaacaaagaataaacggcaggcgtctgccctgccgtttattctgtttcagcgggcgttactgctggctttcacgctcggcgataaagcccagcgctttgttgatgcgctcaatgctgcgggttttaccaatcgcatgtacggtgacatccagcgcaggcgactgcccggcaccggtcacagccacacgcagcggcatccccactttacccatccccacttccagctcatccgccgtggcctgaatcgcgtggtggacgttttctgctgaccagtccgtaatcgccgacagcttgtcgcgcaccacttccagcggctgacgcgctaccgggcggaggtgttttttcgccgcatcggcgtcaaactcgctgaagtcttcatagaagtagcggcagctctgcgccatctctttcagagtcttgcagcgctcgcccagcaacttcaccagttcagcaagctgcgggccgttacgggtgtcgatattttcctgctcaatatgccactgcaaatgcgtcgccacatattccggcgccagcgtattgatatagtggtggttcagccacagcagtttatcggtgttgaacgcgctcgcagacttgctcaccgcaccgagggagaacagcttgatcatctcttcgcgagtgaagatttcctgatcgccgctggaccagcccagacgcaccagatagttcagcaacgcttccggcagataaccgtcatcgcgatactgcatcacgctcaccgcaccgtgacgtttagacagctttttaccgtcgtcgccgttaatcatcgacacatgcgcgtacatcggcaccggcgcgtttaacgctttcaaaatgttaatctggcgcggagtattgttgatatggtcttcgccacgaatcacatgggtaatttccatatcccagtcgtccaccaccacacagaagttgtaggtcggcgaaccgtcggtacgacgaatgatcagatcgtccagttcctgattgctgaattcgatcgggccacggatctgatcatcaaaaataacggaaccgtcctgcgggttagcaaagcgcaccacgcatggctcatcgtcggcatgatgttcgtaactgtgacggcaacgcccgtcataacgcggcttctcgcctttcgccatctgctcttcacgcagttgctccagacgctctttagagcagtagcatttataggctgttcccgcctccagcatctcgtcaatcaccgcgttatagcgatcaaaacgtttggtctggaaatatgggccttcgtcccattccaggttcagccagttcataccatccatgatggcttcaatggcttccggcgtggaacgctcaagatcggtgtcttcaatacgcagcacgaattcaccgccgtggtgacgtgcgaaaagccaggaataaagagcagtacgcgcgccgccgacgtgcagataacctgtcgggctaggcgcgaagcgagttttgattttcatgaaatggccttacgtttataaagatgccgacaaccggcaaatcctggaaagatgaatagccttgtattctatcactgtggcttgattcctcaatgttgatccggtcagaacactgcgctttgctatttccgtatagaaatcatgcagcgcggggtaattcacgatcgttttgtttaattttacgacgaacaaacaaaaactttagaaaatgcgttgactcattttcaactctccctataatgcgactccacacagcgggggtgattagctcagctgggagagcacctcccttacaaggagggggtcggcggttcgatcccgtcatcacccaccaactactttatgtagtctccgccgtgtagataagaaattgagaagtgggtgattagctcagctgggagagcacctcccttacaaggagggggtcggcggttcgatcccgtcatcacccaccactttctcgccagctaaatttcttattgtgaagtaccgaagtgggtgattagctcagctgggagagcacctcccttacaaggagggggtcggcggttcgatcccgtcatcacccaccacttcgggtcgttagctcagttggtagagcagttgacttttaatcaattggtcgcaggttcgaatcctgcacgacccaccaatgtaaaaaagcgccctaaaggcgcttttttgctatctgcgatatggaagattcgaacctgcagcaggttcgggtcttgcctgatgcgctgcgcttatcaggcctacagacgacaccgcacacgtaggccggataagacgttagtcgccatccggcacagacatcataccgtcaacgccgccaccagtttctccagtgctggcgttgcctgctgctggtcatacacaatatacaaatccgccggaatacgttcctctaacggacggaacaccacacccggccagctcatttgcgcatagccatcagccatcaacgtaatcccgatccccatactgatcatcgccaacaccgtttgcggctcaaccacttcccgaataatcattggcgagaaacccgcctgttggcatacacgttgtaaaaatccccaatcagaatgtacggaaggcaacgtaacaaaatattcattgcgcaacgccgacagcggcacagaatctctggatgccagatcgtgatcttccggaactgcaaccatgaatgcagattcatgcaaacgtatgctggtaaaaccgactgccggttcgatagccatacgccagatccctgcatcaagttcccgacgctctaacaacgccatttgcataccgggagacttttcgcgaaaaagtacttcaacattgggatttgctttcaaaaagtgacgcatcgcaggacgcattcttccccacagcgccgtaccaaccacacccagttcaatgcgccccgcttcaccgcgaccaatctgctccactcgcgccagcgcctgatttgcactggctaacaagcgacgtgactcctccattaaaactttcccggcatgggttaatgcaacgctgcgggaatgacgaataaacagcaatgtacccagttgctgttcaagttctttgatatggatactcaagggaggttgtgacatatttaaccgggcagcagcccggccaaaatgcaattcttctgcaacagcgaggaaataacgtaatagctttagatcaatacgatgggctcgttccatcactatcgcactccaggaataagggataacgtctggaatttaccatattacctagtaaaaaatagatttaacgacaagatacccaatatacataaatacaatagataataccccgggtaaaacatttggtgcgggaataggtatacggcataaagtaaaaaatgcgccaataccaaatccaataccggaggagagaataatttctttcatgctgtgtccttgttcataaaaatggactggcgaacatcctctcgccagtcaaataaaattaatgtgctaatgatttggtcgacagtttttctggatggtgctgatatttaaagaacaatgcaaaaataacggccaatgccagagcgtaggcggcaaagaccagccagatggtttgccaatcttttacgccatcaatagaaaaataatccacggccataccgcttaaaagagacccaatccacgcccccacgccgttaaccatggtcataaacaacccctgcgcgctggcgcgaatacttgagtccacctcctgctctacaaatactgaccctgagatgttgaagaaatcaaatgcgcagccataaacaatcatcgacagcagcagtagcacaaagccaaacggggatggatcgccaaaggcaaagaagccgaaacgcagcgtccacgccagcatactcatcagcattaccgttttaataccaaagcgtttaaggaagaacggaatggtgaggataaagcccacttccgccatctgcgaaactgaaagcaagatagagggatacttcaccacaaagctgtcggcaaactcaggattacgggcaaaatcatgcaggaacggattaccgaagacattggtaatttgcagcaccgcccccaacatcatcgcaaacaaaaagaagattgccatgcgtggatttttaaacagaacaaaagcatccagtccgagcttactggcaagcgtggtgttcgccttcttctcggctaccggaattttcggtaacgtcagcgcatacagggccagcaataacgatgcgccagaagcgatgtataattgcgcactgctcagttccagccccatcaggctcaccgtccacatcgcaacaataaaacctattgtgccgaaaacgcgcacaggcggaaatgacgttaccggatcctgacctgctttcgccagacaggagtacgaaacgctattggataatgcaatcgttggcatatacgccatcgcattaaccaacatcacccagaacatcgtctggggatcggtaacggtggtggcgtacaataacgcccccgcgcaaaccagatggcaaagcatataggctcgctcagcgcgcagccatttatcagcaatgatccccataatgcccggcatgataatcgctgccagtccttttgagctgtagaccataccgacattcgcgccggtaaaatccagagtgttgatcatgtaagagcccagggtaaccagccagctcccccagataaaatattgcaagaacgacatgacttttaagcgggacgtaatacccattttttattccttgccgtgagataaagccccaatacggggccgtagtcattgtgtttaggccagtttacgtaaaaagccgcaaatcagatttataaagttctgccgggaaagttcagccgccgccagcgtttgcgcatgggagagttttacatcgcccagcccttccgccagattggtgatcgctgagacggcaacaactttgaggccacaatgacgtgcgctaatcacctcagggacaacggacattccgaccacatcgccgccaataatctgcatcatgcggatttctgccgccgtttcgaagttcggacccggataagaaacaaatacgccttcagtgagggggaatccctcctctgccgcaacggactgaagcatggcgcgataatctgcgtcataagcattagccagcgagaagaagcgatcgccataacgatcatcgtttggccccaccatcggcgtaccgggcatcgtattaatgtgatcgctaagcgcaaccaggctacccggccccacttccggacgcagagatcctgccgcattggtgcagaacaacacttcacagcccagtaatttcaacgtgcgaatggcatcggtcatcaccgccattccacgcccttcataaaaatgtccgcgacctttcatacaggccaccggaacacccgccagatggccgagcaccagttcaccagcatggccgtgtacggtgctgacgggaaatcccggcaatttctcgtaagaaatggctaccgcatcttcgatttgatccgccagagcacccaacccggagcctaaaataaacgcgactcgcggggtaaatgccggtttatgtgcatgaataatatcaatacaatactcaggattatgagaaaaaagagcgtgaggcataagtttccttgttctatcggatttaatttgactcctttttataacgaccatcgccccttgctgaccaatacacttttcacgtgtcatcaatagccatttaatatcgatagatttagatcgcttctgtattaatacagagggaaaacagtattggtttttgcttgcacttcatattaacaatatgccgctttcatatttataaattgcctctttttaattaacccattaataattatcggcatagggaaatatgctatgaaaaaaattcttactctgacgctttcttctttactcattattcccgcactcacccatgcggaatttaaaggcgggttcgccgatatcggcctccattacctcgactggacatcagacaccacggaaaaaaccagtaaaaaatcccataaagatgattttgggtacctggaactggaaggcggagcgaattttagctggggagaaatgtacgggttcttcgactgggaaaatttttacaatggccgccacgctaaaccaggcagcgaacagcgttacacctttaaaaataccaaccgtatttatctgggcgatacaggattaaacctctatctccatgcctacgggacgtacggttcacctcatcgcgctaatttccatgatgacatgtttctctatggtttaggctataacttcacaggtaacggttactggtttaaacccttctttgccaaacgttataccgatcagacctactacacaggcgataatggttatgtattaggttgggtggccggctatagcttctcgttgggtagtgagaaattcagcgtaacgaactggaatgagtatgagtttgaccgcgatgcgtcctacgctgcgggcaatggcgggaaagatggcattaatggcgcagtagcgctgtggtggaatgcgactcctcacctgaccgcaggagtacaatatcgttacgctgataataagttaggagaatccttcctgcaggatggcattatttattccatcaaatacctgttttaacacactgccctgtcaaaaatggcagggcaagaccgcacctcacacacggacagatagatatttatagctgatacagcggatctttcgccctcgcggcggttaattcgctggcctgggtacgcaccacgtcccacaacgcctgcgccgccgtggagagcgatcggttttttcgtcgcgccagcatgagctgcctttcaactacgggcgtcagccgtttaacctgcaagtggctgccctgcgggagcggtaacgccagcgcgggcagcacgctgatgccgattcccgcttccaccattggaaacagcgtggccgggtgaccaatctcctgcacgatatccgcctcaatagcaaaatgggccagcgccgcatcaatcagcggtcgactgccggaagcataatcctgtaagaccagcgaggcctgtttaagatcctgccagctcacccattcctgatgcgccagcggatgatcctggcgacacaacagtaaaaaaggctctgataagatggcttcacactgtaaatccaccgctgcgccgggatcgataacgatgccaaaatccacttcaccctggcggatgctctccagcacccactgctgcggacgatcgtgcaatacaaaatcaatagcgggataaagtgaattactttgggcaatgcattgcggaataagatgcgcagaaatggtttggctcgcggcaacgcgcacggtgccggttaattgtgtccctactctgcctgcatcgcgcagtatgctgttcagttcatcaagcacccgctccagacgcgtcgccagttgttgccccgcctcggtcagcaccacctcacgcgtggtgcgatccagcagtctgacgccggtttgccgctccagctcttttacgctatgactgaccgcagactggctcagtccaatcctgtcccctgcccgactgaaacttttggcctgggcgacggtaataaaaatacgcagttgacgcagtgaatagttcatcgactagattcatatatagatgcaataaattaattttatttctcaaagcgaaaaacgcaaaatagctgcaccgactttcaggagtttttatgaaactttttcgtatccttgaccctttcacgctgacacttatcaccgtggtactactggcctcttttttcccggcggaaggcggctttgtgcctgtcgttgaaggcattacgacagcggccatcgctctgctgttttttatgcatggcgcgaagctttcacgtgaagcgatcatcgctggcggcagccactggcggttgcatctgtgggtcatgtgcagcacttttgtgctctttcctgtcctcggcgtactgtttgcctggtgggcgcctgtcaatgtcgaccctatgctctacagtggctttctgtatctgtgcattttgcccgccaccgtgcagtcggcgattgcatttacttcactcgcgggcggtaacgtcgcggccgcggtgtgctcagcgtctgcgtccagtctgctgggcattttcctgtcgccgctgctggtcggtctggtaatgaatattcatggcgcgcagggcagtctggaagaggtgggcaaaattatgctgcaactgctgctgccttttgtgctgggacacctgtctcgcccgtggatcggcaactgggtcgcgcgcaacaaaaagtggatcgcgaaaacagatcagacctctattttgctggtggtctactcggcgttcagcgaagcggtggtcaacggcatctggcacaaagtcggctggggatcgctgctgtttatcgtcgtggtcagtctcatactgttggcgatcgtcatcaccattaacgtctttgtcgcccgtaaatgcggcttcaataaagccgacgaaatcactattgttttctgcggttcgaaaaaaagcctggccaacgggatcccgatggccaatattctgtttccgacgtcagtgctgggtatgatggtattaccgctgatgatcttccaccagatccaactgatggtctgcgcagggctggcgcggcgctacaaacgccagaccgagaagttacaggcgcagcaggaaagccgcgccgcgaaagcttaaagcgggcgtttcaggggctgtaccagttgcgtcagcccctcggttttaatcagcagcgtgatttgcatcaactcccccagtttacccgccggaaattgatctttacgggcaaaccacagcaaatactcttccggaaggtcgatcaatcgacgtccctgatatttgccaaagggcatcacggtgttggcgatttcaaccagctgctctttttccatctcaggcacccagtaagcggatcatttccgcttcatcaatcacggtaatacccagttcctgcgctttggccagtttggagcccgccgcttcaccggcaatcaccagatcggttttcttcgatacgctgcctgccactttcgcgcccagcgccgctaaacgcgctttagcgtcatcgcgggacatctggctcaggctaccggttagtaccacggttttaccggcaaacgggctatcgacctcttgcacattaatgactaccggcgcgggccagtgaaccccttccgccagtagctgcccaatcacgtcacgattgctctcttcggcaaaaaagttaaagacgtgcgtagcgaccacaatccccacgtcgggtactttctgcaactcgtcaatggtagcggtctgcagcgcctccagcgtgccgaaataagccgccagccccgccgccgtcgcttcacccacttcacggatgcccagcgcatagagaaaacgcgcaaaagtcgtcgctttggctttttccagcgcgtttacaacattttgcgcggactttggccccattcggtccaggccggtcagtttacccgccgtcagacggaacagatccgctggcgtatggacatactccctttccaccagttggtcgatgatcttatcgcccatcccgtctacatccatcgcccggcgcgacacaaaatgtttcagcgactctttacgctgcgcgccgcaaatcagcccgccggtacaacgggtaacggcttcgccttcaacgcgctctacgtccgatccgcacaccggacagtgcgttggaaacacaatcggacgcgtctcttcagggcgttcggacagaaccacgttgaccacctgagggatcacatcgcctgcccgacggataaccaccttatcgccaatgcgcaagccaagtcgctcaatttcatcggcattatgcaacgtggcattgctgaccagcacaccagccacctgaaccggttccagacgcgccaccggcgtaatcgccccggtgcgcccgacctgaaactcaacatcgcgcacaaaagtcatctgctcctgagcaggaaatttaaacgccaccgcccagcgcggcgcgcgggccacaaagcccagctgttcctgcaaagccagcgagttgaccttaatcaccacgccgtcgatatcaaaaccgagcgtggggcgatctttttcgacgttgcgataaaaatccagtaccgcctggggagaatcgcacagcgtcacgcgatcgctgaccggtaacccccacgctttaaattgcagcaaacgtcccagatgcgtatccggcaactcgccgccttccagaataccgacgccgtagcagaaaaatgttagcggtcgcttcgccgtaatacgcggatcgagctgacgcaacgagcccgccgccgcgttacgcggattagcaaacactttgccgccagtgcggcgcgcgtcttcattgatcttttcaaacccggcctgcggtaaaaatacctctccgcgaacttcaagacgcgccggaatgttatcgccgtgcagctttaacggaatggcgcgaatcgtgcgcacgtttgaagtaatatcttcaccggtggtgccgtcgccacgcgtcgcagcgctcaccagcacgccgttttcatacagaatgctgaccgccagaccatccagctttagctcgcagcaccagatgacattttccgtgctttttagacgatcctgcactcgcttgttaaacgccaggaagctttcttcatcaaatacgttatcgagcgacagcatcggtacttcatggcgaatctggttgaatgccgtcagcggcgccgcgccaacgcgctgcgtgggcgaatccggcgtgataaggtccggacgttgcgcctccagctctcgcagttcccgcatcaggcggtcatattcggcgtcgggaatctcgggcgcatccatcacatgatacagatattcatgatggcgaagcgtggttcgcagttctgtcagttgttgttcgattggttccatatcacaccatcaatgataaaaaacccccgacaggcgggggttacgttaaaaatgtcacacctgcgttaacctcaggcgttagcgtccatcacctcgcggatgcggtcctgatattcgcgcagtttctgcggcgtcatcatccgacgctggtcatccagcacgacgccgccgacctcatcagcgatatgctgcgcggattgcagcatcagcttgaaattctgcagcgcatcgccgtaagacggtacctgcataaagatagtgacgccaggcgtagtgaagtccgtcatttcaggatcgaacgttcccggattgaccatattcgcgagactgaacaaggccgggccgctgccgtccgggctcaaatgacgatggaaaatattcatatcgccaaatttaaagcctgactgctgaatactgttcagtaacacttcaccattaagctcgctgccatgatgggccgcgacgttcataatgatgaccgcctctttacgctgcggtttttccacaaccggcgcttcttccactaccggttccgcctcaaccacaggttccgcaggctggaaggtttgcgctgatggcggcggcgcgggctgcgcaacaggctgcggcgcttgcgacggcggtgcaggctgctgttgcggcggctgtaccggcggcgcagatggctgaacctgctgaggctgcggcgcaggttggaccggttgctgaaccggctgttgcatcggcgcttgcggctgcggcggcgccgctggacgcggttgcgcagacgcataaggcggctggtactggtgttgcggcgactgacgaggggcatcatgctcctgcgactggccgggggcatgatttacgcggtgaacacgaacttcacccacgccttcgtcttcttcgacatcgtcgtcatacgagtcgtcgtcgcgtttcgatttcatgcgttttagtggacgatcgcggaacatagaagatcgttctttacggctggtccagaaaccatgtaccagtaaagcgattatggcgatcgcgccaacaatgattaatatcagacgcaaatcctgcatcattatattctctgttgttctaacaccttgccaccacggcaaacatttactcactaagagtatttgccgattacgtcaagtgcaagtgtactgttggctttcgcagcataaagatgaaggaaaatgtgctttttgctgttttttcgaacatttccgaactatccaccgtctgataaccgggtaagatatcccacgtttacccagggctttaagaaaaaggagtatgtcctgaatatggtttcatcatccacaaccgtaccacgtagcggcgtctattatttctcgcaaggatggaagttagtcaccctaccgggaatccgccgctttgttattttacctttgctggtcaacattgtgctgatgggcggcgcattttggtggctgtttacccagcttgacgcctggataccttcgttgatgagtcatgtgccggactggctgcaatggctgagctatctgctgtggccgattgcggttatctctgttctgctggtctttggctattttttctctaccctcgccaactggatcgccgcgccgtttaacggccttttagccgaacagcttgaggcgcggttaaccggcgccacgccgccagataccggcatactcggcatcatgaaagatgtaccgcgcattatgaaacgtgaatggcaaaagctggcgtggtatctgccgcgcgctattgtgctgctggttctctattttattcctggcattggccaaaccatcgcgccggtgctgtggtttttgttcagcgcctggatgctggcgatccagtattgcgactacccgtttgataaccacaaagtgccgtttaaaacgatgcgcgccgcgttgcgcacgcagaaggtggcgaatatgcaatttggcgcgctcaccagcctctttacgatgattccggtgcttaaccttttcattatgcctgtcgccgtctgtggcgcgacggcaatgtgggttgattgctggcgtgctaagcacgcgttatggaaataacgtaaaaatgtataaataagagatggcttatgctgtctcttattccatactgataaccattatttcccatcagcatatagatatgcgaaatccttacttccccatatctggctggaaggtatgctgggaaggtatcccaatttcatacagttaaggacaggccatgagtaagatttatgaagataactcgctgactatcggtcatacgccgctggttcgactgaaccgtatcggtaatggacgcattctggcgaaggtggagtcgcgcaacccgagcttcagcgtcaagtgccgtatcggcgccaatatgatttgggatgccgaaaagcgtggcgtactgaaacctggcgtggaactggtggagccgaccagcggcaacaccggtattgcgctggcgtatgtcgccgccgcgcgcggttacaaactcaccctggccatgccggaaaccatgagcattgaacgccgcaagctactcaaagcattaggcgcgaatctggtgctgaccgaaggggcgaaagggatgaaaggcgctattcagaaagccgaagaaattgtcgccagcgatccgcaaaaatatctcctgctccagcagttcagcaaccctgccaacccggaaatccatgaaaaaaccaccggcccggaaatctgggaagacaccgatggtcaggtggatgtgtttatctccggcgtcggcactggcggtacgttaaccggcgtcacgcgttatatcaaagggacgaagggtaaaaccgatcttatcaccgttgcggtagaacccactgactccccggttattgcccaggcgctggctggtgaagagatcaaaccaggcccgcataaaattcagggcatcggcgcaggcttcatcccgggcaacctggatctgaaactgattgataaagtggttggcatcaccaatgaagaagccatttctaccgcgcgccgtctgatggaagaggaaggtattctggcaggaatttcttccggtgccgcggttgctgcagcgcttaagctgcaggaagatgaaagctttaccaataagaatattgtggttatcctaccttcatcaggtgagcgttatctgagcaccgcgttgttcgccgatctctttactgagaaagaactgcaacagtgatgccagcatgttaaaaacgcgtaaaaaagcacctttttgggtgcttttttgtggcctgcttcaaactttcacctcacctggcattgattcaccctgccggaactggtatttaaccagactaattattttgatgcgcgaaattaatcgttacaggaaaagcgttagctgaatcgattttatgatttggttcaaatcttcctttcgcggcataatgtttaatgacgagcgaaacgtcagcggccataagttgccagcaacggattgcgtagaacaccttttgtgtcgcgtcccgtttacgccggcgctaacaatacaggctaaagttgagccgccaggctagactttagttccacaacactaaacctataagttggggaaatacaatgttccagcaagaagttaccattaccgctccgaacggtctgcacacccgccctgctgctcagtttgttaaagaagcaaaaggcttcacttctgagattactgtgacttccaacggcaaaagcgccagcgcgaaaagcctgtttaaactgcagactctgggcctgactcaaggcaccgtcgtcaccatctccgcagaaggtgaagatgagcagaaagcggttgaacatctggtcaaactgatggcggaactcgagtaagtttttttccgggttcttttaaaaatcagtcacaagtaaggtagggttatgatttcaggcattttagcatccccgggtatcgctttcggcaaagcactgctgctgaaagaagacgaaatcgtcattgaccggaaaaaaatttctgccgacaaggttgatcaggaagttgaacgttttctgagcggtcgtgccaaggcatctgcgcaactggaagcgatcaagacaaaagctggtgaaacgttcggtgaagaaaaagaagccatctttgaagggcatattatgctgctcgaagatgaggagctggagcaggaaatcatagccctgattaaagataagcacatgacggctgacgcagccgcacatgaagttatcgaaggtcaggccactgccctggaagaactggatgatgaatacctgaaagagcgcgcggctgacgtacgtgatatcggtaagcgcctgctgcgcaacatcctgggtctggccattatcgatctgagcgcgattcaggaagaagttatcctggttgcctctgacttgacgccgtcagaaaccgcgcagctgaacctgcagaaagtgctgggcttcatcaccgacgcgggcggacgcacgtctcatacctccatcatggcgcgttctctggaactgccagcgatcgtaggtaccggtagcgtcaccgctcaggtgaaaaacggcgactatctgattctggatgccgtaaacaaccaggtttacgtcaacccgaccaacgatgttattgagcaactgcgcgccgtccaggagcaggttgcgaccgagaaagcggaactcgcaaaactgaaagatctgccggcaatcacgctggatggacatcaggttgaagtttgcgccaacatcggtaccgttcgtgacgttgaaggcgctgagcgtaacggcgcggaaggcgttggtctgtatcgtactgaattcctgttcatggatcgcgacgcgctgccgacggaagaagagcagtttgccgcctataaagcggtcgctgaagcgtgcggctcgcaggcggttatcgtccgtaccatggacattggcggcgacaaagagctgccgtacatgaacttcccgaaagaagagaacccgttcctgggctggcgcgccgtgcgtatcgccatggatcgcaaagagatcctgcgtgaccaggttcgcgcgattctgcgtgcctccgctttcggtaaattgcgcattatgttcccgatgatcatctctgttgaagaagttcgcgcgctgcgcaaagagattgaaatctacaaacaggaactgcgtgacgaaggtaaagcatttgacgaaagcattgagattggcgtgatggtggaaacaccggctgcggcgacaattgcgcgtcatttagccaaagaagttgatttctttagtatcggcaccaatgatttaacgcagtacaccctggcagttgaccgtggtaatgatatgatttcacacctttaccagccaatgtcaccgtccgtactgaacttgatcaagcaagttattgatgcttctcatgcagaaggtaaatggactggcatgtgtggtgagcttgcaggcgacgaacgtgctacacttctgttgctggggatgggtctggacgaattctctatgagcgccatttctatcccgcgcattaagaagattatccgtaacacgaacttcgaagatgcgaaggtgttagcagagcaggctcttgctcaaccgacaacggacgagttaatgacgctggttaacaagttcattgaagaaaaaacaatctgctaatccacgagatgcggcccaatttactgcttaggagaagatcatgggtttgttcgataaactaaaatctctggtttctgatgataagaaagacaccggaactattgagattgttgccccgctctctggcgagatcgtcaacatcgaagacgtgccggatgtagtttttgctgaaaaaatcgttggtgatggcatcgctatcaaaccaaccggtaacaaaatggtcgcccctgttgacggtaccatcggcaaaatctttgaaaccaaccatgcgttctctatcgaatccgatagcggcattgagctgttcgttcacttcggtatcgacaccgttgagctgaaaggcgaaggcttcaagcgtattgctgaagaaggtcagcgcgtgaaagttggcgatccggtcatcgagttcgatctgccgttgctggaagaaaaagccaagtctaccctgactccggttgttatctccaacatggatgaaatcaaagaactgatcaaactgtccggtagcgtgaccgtgggtgaaactccggttatccgcattaagaagtaattcttgccgcagtgaagaatggcgcctttgggcgccattttttttgcctgtaggccgaataaggcgcttgcgccgccatccggcgatggtgtggcgcactgcctgatggcgctacgcttatcaggcctacaaggttgcgaacatttcagcgccaatccacgggttacaactgcgaggtcaccgggcgaaagcacttctcgcgcatcaggatcttcatcccctccgggccactctccagcatcctgcgttcggaatcggacacttgcaactcgcactgatagccgccagtgatgccaaacatcgcccgcgccacgcagatatcttccagcgcgtccagcccgctcgtttcaaaatgccccacgatacgtccctgctggcgaaccaccagccgataactcttcatcgcgcctcccctgccggcggcagaattaactcatcacagccacactgctgtgtccaggtcatcacctccagcacgcgctgcgccgcatcttttgccgcggtcgtcagttttttcccctgcacaataccgctgaccagctcggcgcagaagagatctcccgtcccttttaactccgtcgccacccgcggatgggcaaagacctccacgacctgcgcagtaacgaccgcaaccgttatggtctccagagactcgcccggcgcgctggtgataaccacccatttcaacgtatcggaaagcagcgattgcgccgccgccaccgcctcttccagcgtgcggcacggtttaccactcagcatctccagctcaaatacgttcggcgttagcccctgcgcctgcggcaacaaatgcgtgcgataagcctgcggaatttccgcctgcacatacattccactgtcggtatcgccaatgaccggatcaacaagaatacacacctccggatgcgaagcccggatcgccattagccacttcgaaagcaagacaatttggtctgcgctgcccatgtaaccggtggtaatcgcttttaattcacgtagcgcatcgcgctcattcaacgccgtaaggtagcctgcaaaccactcggcgggaataatgccgccataaaaggttttatagtgcggcgtattgctgaatagcaccgtcgggaccgccgtcacgcgtagtccctgcgctttaatggccggaacagcgatactgttgcctacgctgccgtacacgacctgtgactggacggcgacgatatcggtctgtaatgcccgatggttgtcgtcgaagagcactgactgaatatcactctcttgtcccatagaattttcctctcgctggacagcaggctaccgcctcattatcattgtcatatgctaaaattcattttgtcataggtcaataatgatcgacggaaaaaccgctaacgaaatttttgacagtatccgtcaacacattatcgccggcacgttacgggcggaggattcgctcccgccggtacgggagctggcaagcgaattaaaggtgaaccgcaataccgtcgcagcggcgtataaacggctgataacggcgggactggcgcaaagtttaggccgcaatgggacggtgattaaaggcagtccgtctcccgtagcgctggaaggcggcgatccgcatacgcctctgcacgacctttccggcggcaatcccgatccgcagcgtctgcctgaccttagccgttattttgcccgtctcagccgcacgccgcatctctacggcgatgcgcccgtttcccctgaactacacgcctgggcggcgcgctggctacgggatgccacccccgtcgcaggcgaaattgatatcaccagcggagctatcgacgccattgaaagactgctttgcgcgcatctgctgccgggcgacagcgtcgcggtggaagatccctgttttttaagcagtatcaatatgctgcgctatgccggttttagcgccagcccggtcagtgtggatagcgaaggaatgcagcctgaaaagctggaacaggcgctaaaccagggcgcgcgggcagtgatcttaacgccgcgcgcgcacaaccctaccggctgtagcctgagcgctcgccgtgccgctgcgctgcaaaatatactggcgcgttaccctcaggtagtggtcattatcgacgatcacttcgccctgctttcttcgtcgccctggcagccggttattgcgcagacaacgcaacactgggcggtgatacgctccgtttccaaaaccctcggccccgatttacgtcttgctattgtcgccagcgacagcgcgacctcggcaaaacttcggctgcggctaaatgccggtagtcagtgggtcagccatctgttacaggatctggtctacgcctgcctgaccgaccctgagtatcagcacaggctggcgcaaacgcggctgttttacgccacccggcaacaaaaactggcccgcgccctacagcaatatggcatcgccatttctcccggcgacggcgtgaatgcctggctcccgctggacacccatagccaggctaccgcgtttacgctggcaaaatccggctggctggtacgtgagggagaagcctttggcgtaagcgcgccgtctcacggtctacgtatcacgctgtcgacattaaatgacagcgagatcaacacgctggcggctgatatccatcaggcgctaaatcgctaacaggagaaaataacgtgcgagttcattttgttgtccatgagtcgtttgaatccgctggcgcttatctgaaatgggctgaagatcgcggttataccatttcatggtcgcgcgtctatgccggagaagcgctaccgcccaatgccgatgagttcgatatgctcgtggtatttggcggtccgcagtcgccgcgcaccacccgcgaagagtgcccgtactttgactctcgcgccgaacagcacttaattaatcaggcgattacggcccggcgaatggttatcggcatttgtcttggttcgcagctcattggcgaggcgctgggcgccgcggtgtgccaaagtccggaaaaagagattggccactaccctattacgctcactgaagccggtctgcggcatccgcttatcgcccactttggctcaccgttaaccgtcggccactggcacaacgatatgccaggactcaccgatcaggcgaccgtgctggccgaaagcgaaggctgtccacgtcagatagtgcagtacggtaattttgtctacggtttccagtgccatatggaatttaccgtcgaggcggttgaaggattaatccaacattcgcagcaggagctggccgacgcgcaagggaagcgttttatccgctcggttgccgaaatgcgcgcatggaattaccagcaaatgaatgaaaagctgtggcgttttctggatgaactcacgctggcgcactcacaaaaataaccccaccaggagtgcaacttattacccggctaacggtctgaggtgcagtgattatcgcatgaaaaaggattttaccatgaagaaaattgtctgcgccgtcgttgcgctcctgctgaccctacccgcctgggcgaagctaaacgcccacgaagaagcgcgcattaacgccatgctgaatgcgctggcgcagaaaaaggatctgaccttcgttcgtaacggtgatgcgcataactgcgaggaagccgtatcgcacctgcgcttaaaactgggtaacacgcgcaatcgtatcgacaccgccgaacagtttatcgataaagtcgcgtcgtcgtcgtccatcaccggaaagccctatatcgttaaaattcccggtaaaagcgatgaaaacgcgcagccttatttacatgcgcttattgcggaaacggataaaacggttgcgccgtaagggaagtaaaccgcagcaatgaagctggcggtgcgcaatgggttattctcatgcaacagacctgccaggcagatctgttgcttaaaaagtagagcaggattaacgcttataagtactcaaatcaattgtctgctcgttacaccgcccttctttcgtgtcgtatttttgcaggtattccttcgccagtttctccgcctgttttcgttcatcggaactcatactgttctcaaaacgtcccctgtctatcaatccccatttagaacctcgcgtcgctgctaccgtgagccatgcccacgcctgaacatattcgtgtcgataagcataagtcgcaccaatattttgctgggcggtacactgaccctttttagcggcatccgtaaaataggcaaatgatttttccattatccactctactgaacggtgctcatcctcgggggcaacatgtccatgctcatataacacgcccagattatttgtcgcttttgcgctcccttgagctgcagctttttgataccaaaaaacggctttctccacatcacgctccacaccatcgccaatatgatatttacggcccagttgaaactgcgcattcatatcccctcgatctgcctgttgctgtaactcatccaacgaggtttctgcataggcaagaggggcaatggcgtaaaacaaaccgacaaaaatcagtgtccggaaagcaaatttcatgaaattaattcctttaattacgtagcgtcatcatcctttttgacgtgtttttatacctaaagatagctttctgtgtgtctgattccgcaccatcgacaatgtgatatttccggcccagttgaaattgtgcggtcatatcccttttgcagtcacttatccaatgagtttcagtttgaacagaggagacatggtgcaactagcaggaaaaactgcgctattcctggtcaatttcatagcattggcgatcatatctaaatccctgccccctggctgaaatgctcttcaccaaacacgccggtcgaaaggtaacggtcgccgcgatcgcagatgatcgccaccactatcgcgccgggcgtggctcgtgcgacgcgtaacgcgcccgctaccgcgccgccggaactcacgccgcagaaaatgccttcacgaacggccagttcacgcatggtgttttcggcatcattctgatgaatatccagcacctcatctaccagcgaggcgttaaaaatgcccggcatatattccgcaggccagcggcgaatgcccggaatactgctgccctcttccggctgtaggccaacgatggtgaccggtttttcctgctcgcgcagaaaacgcgacacgccggtaatggtgccggtcgtgcccatgctggagacaaaatgggtgatgcgacctgacgtttgccgccagatttccgggccggtggtcgtgtagtgggcgtagggattatcaggattattaaactgatcgagcagtttgccctcgcctcgctcagacatagcgagcgctaaatcgcgcgccccttccattccctgctctttagtgaccagaatcagttccgcgccataggcccgcattgccgcccgacgctcctggctcatgttgtctggcatcaacagcttcatgcgataacctttcagcgcggcgatcatcgccagcgcaatgccagtgttgccgctggtcgcttcaatcaggacatcgcccggtttaatttccccgcgcttttccgcctcgacaatcatcgatagcgccgcgcgatctttcaccgatcctgccggattattgccttccagcttgacccagatttcactgccgttatccggccccagacgttgtaatttgaccagcggcgtattgccgatggtttgttctaatgtattcacgttttcagctcgtaaaaaagcccggtatgcgtagcgccaccgggcgataactatacaaattaacctatcaggccgattgcgccagagcaagttcctcttcacgcgtttcaatacgctggtcgccgttatacagacgcgctttttgcagtccaacaaacaaacgctcgccgcgaaccggaacatcctcacccgccatcaccaccgtcagcggatcgtgataccaccccagcggctgcaccactagctgtgtatagtgacctttcgggctggcctcaatgacctgtactggtagcggagaatccaggctggtgcggcggctaatatccacctcccacggacgcaggaacagatcgaccggcccctggtacgcgggcgtataacccagcggccagcgatgcgcgccaacgtgaaactgcccgccgcggacggtgcctgtcaggcggttcacctcgcccataaactccagtacgaagcgggttgccggttcacgccacacccgatccggcgcatcagcctgttcgatattgccctgactcatcaccaccacccgatccgccacttccgtcgcttcttcctgatcgtgggtgacaaagacgctggtgaatttcagttcttcatgtagctggcgcaaccagcgacgtaactctttacgtacctgggcatccagcgcgccaaagggttcatccagcagtagaatttgcggttctacggcaagcgcgcgcgccagcgccacacgctgtttttgtccgccggaaagctgggcggggaagcgatccgcgaggtgcgccagttgcaccatctccagtaattgcatcactttcgttttaatcgccgccgcagttggacggtcgcgtcgcggcagcaccgtcaggccaaaagcaatgttgtcaaacaccgtcatatggcgaaacagcgcatagtgctgaaacacaaaaccgactttacgctcacgcgcgtgcaggcggctaacgtccgtaccgtggaaacgaatatggccgctggactgatgctccagcccggcaataatgcgcagcagcgtcgttttgccggaacctgacggccccaacaaggcaaccatctggccggaaggaatatccagcgagatatcatttagtacctgagtacgaccaaacgatttcttaattctggcgatctcaatgctcatgattttcctcctgttgcgcgcgtttttcctgattctccagacgccattgcaacatgctcttcaaaaacagggtaataatcgccattagcgtcaacaatgcggcggcggtaaaggagccgacggtgttgtagtcctgctccagtaattcaatctgtaacggtagcgataacgtttcgccgcgaatcgagccggacaccaccgacaccgcgccaaactcgccaatcgcgcgggcgttggttaataccacgccgtagagtagcgcccagcgaatattcggcaacgtcacgcggcgaaacatttgccagccggatgcgcccagcaaaatagccgcctcatcttcctgactgccctggctgagcattactggcaccagttcgcgcaccacaaacggacaagtgacaaaaatagtgaccagtaccatccccggccaggagaacatcatttgtaaattatgctcatccagccagccgcccaacgggccgttggaaccataaaacagcagataaaccagaccggccaccaccggcgagacggcaaagggaatatccagcagggtcagcagtagctgacgtccggggaagttaaagcgcgtcaccagccacgccagcagaatgccgaacaccagattcaccggcactgcgatcaaggcaatcaacaccgtcagccagatggcgtgcagcatgtccggatcggccagattttgcagtaccggcattaaccctttgctgaacgcctgcacgaagatgtaaatcatcggcaccagcaggataaacgccgaaaccagcatcccgacgccaatcaaaaaccattttccccagttaatgcgggggacgtcgtatcgcttcaattgagtcacttccgccattaatgacctaccacacgtcgaccaaagcgactttgcagagtgttaattgagaacagcagcagcaaggatgccgcaaggatcaccgaggcaatggcgctggcggcggggtaatcaaactcctgcaaacgcacaaaaatcatcagcgaggtcacttctgttttccaggcgatatttccggcgataaaaatcaccgcgccaaactcgcccaggctacgggtaaaagagagcgccacgccggcaatcagcgcaggcgacagctcaggcagcacgactttgcgaaaactttgcagccgggtggcccccagcgtttgtgccgcttcttcatattccggccccaactcttccagtaccggctggacggtgcgcaccacaaatggaatgctggtaaaggccatcgccaccgcaataccgagccaggtataggtcattttgatatcaaactgcgcaagaaactgaccgtagaaaccgttcactgagaacagcgaggccagcgttaaccccgccaccgctgtcggcagcgcaaacggcagatccatcagcgcatccagcaacgtgcgccctggaaaacggtagcgggttaaaatccacgccatcagcaggccaaacacgccgttaaaaatcgacgctacaaatgccgccagtagcgtcactttataggcagccaccacctgtgggttggtcacgacatcccagtattgcgcccagctcatctgtgagagctgcatcaccagcgcgctcaacggcaacagtaggatcaggcagacaaacagcaaactggtgccgaggcttaacgtaaagccgggcagcacgcgtcgggaagaaacggcaagcattacttacgccccgccgccaatagtttgtccagctcgccgccgctggcaaagtgcgttttcatcacttccggccaggaaccaaacttgtcttccacgcggaacagttcggtctgcgggaatttatctgcttgcttgcccatgatttccgggttattcacgcggtagtagaaatcggtaatgatggtctgcgcctgcgggctatacagccagttcaggtaagctttggcggctttttctgtgccgttggcctgcacgtttttatccacccaggcgaccgggaattcagcaagaatgttcgttttcgggatcaccacttcaaatccctgggcttcatattgtttgcggatgttgttcacttccgattcaaaactaatcagcacatcgcccagaccacgctcggcaaaggtagtcgtagcgccgcggccgccggtatcaaacacttcgacgtttttcaggaactgggtcataaactgttcggttttggctttatcgccgccgtccgcgttatccgccgcgccccatgccgccagatacgtgtaacgggcgttgccggaggttttcgggttagggaaaatcagcttcacgtcggaacgtacaagatcgctccagtcgtgaatatttttcgggttccccttgcgcaccaggaagcccatcgtggaatagaatggcgaactgttgttcggcagacggctttgccagtcggcagggatcagtttgcctttatcatggagaatctgtacgtcggtcacctgattgtaggtgacgacgtctgccttcagtccctgcaaaatcgccagcgcctgttttgatgacccggcatgagactgcttaatcgtcagcttatcgccgccgttatccttcgcccattgttgctcaaacggcgggttaagggcggcaaacagctcgcgggagacatcgtatgagctgttcagcagctccgttgcctgcgcctgccctgccagtaacagcattgctgccagcgtcaggggtctctttttcagtaaattaacggccattgcgcacccttataaatttaatgactttcttatggtcatcatatttataaccagcgctaaaggagtaacggttttatataccgtttgatgatttgaaagttgaaaagggaataagagaatccctccccacgcggcgtgaggaggagaccggcatcaatcagacgcctacgcttacgctttcaggcagggtactgccgccatcaatgacgttttgcgttccggtaagatagctggactcatcggaagccagaaatgccgccagttcccctacttccagtggatcggcaaggcggcgtagcggaatggcttttgccatttccgttaataccgactccggatcgtcaggattagactgacgggcaatgctttccgccatcggcgttcttacataaccggggcaaatggcattcacgcgaataccggactgcgcatactctaccgccagcgatttggttaaaccgacaatggcggcttttgacagcgcataggccgtttcacccgggtccgccaccatatctcccgtgacggaagacatcatcacaatgcggccatctttacgtttaatcatctccggcaggacggctttggtgacgttccagacacctttaatattaatatcaatgtggaaatcgcgatcttcttcactcatatcgaggaagttgcccagacggcacacgccagcgttattcaccaaaatatcaattctaccttcagtctctttggcgcgcgcaaccgccgcctgcaccgaagcaaaatctctgacgtcagccttaacggcagtacagcgatgcccgcgcccgcccagctcatccgccagtttttcaatctcatcggagatatccagcaagattaagttcgcgccgtggcgtgcgaatacgcgagcgatcccttcgccaatgccctgcgatgcgcccgtaatcaatgctgtcttgcccgtgagtttacccattttcaatgtctccttttgaatatggagtcttacactccattaacactgaaaatacagtaataacaaataagtgctgaggaatagctcactaattcaggtaaatattaggtaaaaaaatccccgcggaggcggggatgggcatttttatgctgttctgcctgatgacgctgcgcttatcaggcctaccaatcgtaggtcgaataaagcgtttgcgctgccatccgacagggttttaccttatagcgctaacaggcgatccagcgacggcgcaaaatagtagccgccagtcaccggtttggtgaagcgcagcattgcgtcgcgtttaccgtcggtatcgccgaacatactcagaagctgctgttcgatattgtgcaggcgtgcgcagtaagcgcagaaatagagaccatgagtaccgctggcggtgccgtatggcaggctctgacgcacaatcttcagccctttgccatcttctttcagatcgacgcggctcaggtgagatgttgccggacgcgcatcgccgtcaatctcttcattggcttctttggtacgcccgatcatcatctcctgatcgtgaatactcatccggttaagttgcttgagattgtgttcccaacgctgcacgaacacataactgccgccggcatccacgccatctttgatcaccgccacttcacgacgcgtctcttcgcctgccgggttctctgtcccgtcgacaaagccgctcagatcgcgttcttccacccaacggaagccgtgaacttcttctttcacgtcgatacagtcgccgaaggcttccatcgccgcctgagcaacagaaaaattcacatcgtggcgcagggaaaggatatggatcagcacgtcatactgcgtggccggcgccagccctttaccataaggaataaaatctttcagttcttccgccccgacgccgccactcagggcacgccaggtattgttgccaaacgccacaacggccccaagatgggcgtccggaaatttgacttcgaaggtcgccagtttatcggcaaatgttctgctggccgcgcgcagggcgtccaggtcgccttttacattggcttcaatccaaattgccgcacggcaatgttccggcaaaatgccactttgaacctgagacatgattcctcctgaaaatgagaatgccacgcagtcgtggcattaatggaggctattttaccttgtttttaagcgaagcggtttgttcaggcgcaaattaacgacgccagataattttgcgcacgtcccagttttttaagacgtcatcaggaggcattaagccttccggtccgctccactcgccggagaaaacatagctaatatgctgacttccctcggctttacactcgacgctggtatggctatcgctggaaaccggctcgcagtgaccaaacgctttgctgtaaaggtcgctaaacggcgtaccgattttgccccccgcggcggttgggatatcgctgtccagcacatcaatacggctcacggttccctgctcgccgttgatcaccatcgcgacgctgtcgcccttcatcgcttcgaaaaagcgcaccacgttgccgttatcggttttcataccgctacgcaggcgataatcgccatctaatgcctctgcaatagccggctcttccagcggcgtggcggcggtcagcgctcccacgccttgctcagtgacttctgtcgaggaaccaaaccagttccatggatttgcggcagaccagttgaccgaggagagcgttgagcagccggtcagcgccagcggcagtgcgagtaaagtcaaacgcagcgatttcatctcacttcctttcttttattaattaacgttggttggagtgcgggttcgccaaaaagtgccgttattctttctcaagggaaaaacaggcacgcaaacgttgattggttaacagccagatcagcgcgacgatgtccgccagcagcagcgccagcccgacgccgttgaccgggtcgccacccagccacatcaccggcagccagcacaacgacaccagttgagcaaggatcaggagtccgcgcagccagcgccacacaccaggaaccgcttcacgccgcccgctgagtaaaaatgccactaccgccggaacgccgggcaacagccccagccaaaaattgtcatggtcgggataaaaaaagtttaacaaagtattaccctgtccacgggatgaaccggcaatgacaaagagtacccaggcgcgcgcctgaagtaacagtacgcaccagaacagaaacggcaggcgtaaacgtccgtgtacatcataatcggctggatgaaactcagtactcttcatcttcaatcaggcgtttacccaaacttagggcgtcagaatgctcataccccagacgttcatacatgcccagcacaacgtcgttatcatcgcgcaccataatttggattttcggacacccgcgggcgatgagttttttttccagccggttaagcaacgcattcgcaatgccgcgcccgcggaactccgggtgaacgcccaggtaatacgccgagccgcgatgcccgtcataaccgcccattaccgtaccgacgacttcgccgctaacttccgcaacgaggaacaagctgacatcgtgattcaccttgcgttcaatatccatttcaggatcgttccatggacgcagcaggtcgcaacgctcccagagggtaatcacctcttcgaaatcttcctggcgaaaaacgcgtatttccatggtattcgttgccttttcgggtggaaaaaccaagattatggcgcaaacatctgattcagccaatatctgacgcgatgtagcggaaaaaatggcataatggcgatgtgtcacgtattgaaatgaaaagtaaaacaattctcatcaccaaccgtcgtaacggattacgcgatacgatataacatcttgaacttaattttcacaactcaggccgtatgagcacttttaaactcctaaaaactctcacatcgcgccgccaggtactcaaaacaggtctggcggccctgacgctgtcaggtatgtcgcacgcaatagccaaagaagaaacgctaaaaaccagtaatggtcacagcaaacccaaaaccaaaaaaaccggcagtaaacggctggtgatgctcgaccccggacacggcggcatcgataccggcgcgattggccgcaacggttctcaggaaaaacacgtcgtactggcaattgccaaaaacgtgcgcgctattttgcgaaatcacggaatcgatgcgcgtttaacccggacaggggatacctttattccgctgtacgatcgggtggaaatcgcccataagcacggtgcggatctgtttatgtctattcatgccgatggttttactaacccgaaagcagcgggcgcttccgtttttgcgctttccaaccgcggggccagtagcgccatggcgaagtatctctccgagcgtgaaaaccgcgcggacgaagtggcgggtaaaaaagccactgaccgggatcatctattacaacaagttttgtttgatctggtgcaaaccgatacgattaaaaacagtctgacgctgggttcgcatattctcaagaaaatcaaacctatacataaattacacagccgcactaccgaacaagcggctttcgtggtgctaaaatcaccgtcaattccgtcggtgctggtcgaaacctcgtttattaccaatccggaagaagaacgcctgctgggcacgacggcgtttcgccagaaaatcgctacggcgatcgccaacggcatcatcagttattttcactggtttgataatcagaaagcacacacgaagaaacggtaatcatgaaacccgatgcacatcacgtaaaacagtttctgctacgcctgcaggatgatatttgccaaaagttatccgctgtggatggcgcaaactttgtcgaagatagctggcgacgcgaagcgggcggcggcggacgcagccgggtattacgcaacggcgggattttcgaacaggcgggcgttaatttctctcacgttcacggcgatgcaatgcccgcgtccgccaccgcgcatcggccagaactcgccgggcgtagctttgaagcgatgggcgtatcgctggtggtgcatccgcacaatccgtatattcccaccagccatgctaacgtgcgcttttttattgccgaaaaaccgggcgccgatccggtatggtggtttggcggcgggctcgatttaacgccctactacggctttgaagaggatgccgttcactggcaccgcaccgcccgcgacctgtgccagccgtttggtgacaatgtgtatccgcgttataaaaagtggtgcgatgactactttttcctcaagcatcgtaacgagcagcgcggtatcggcggcctgttttttgacgatttgaatacgccggatttcgaccactgttttgcttttatgcaggcggtcggtaacggctacaccgaggcgtatttaccgattgtcgaacgacgcaaagcgatggtctggggagagcgggagcgtaattttcaactttatcgccgcggtcgctacgtggagttcaatctggtatgggacagaggcaccctgtttggtctgcaaaccggcgggcgcactgaatctatcctgatgtcgatgccgccgctggtgcgctgggagtacgactggcagccggaagcgggtagcccggaagcggcgctgagcgagtttattcaggtacgcgactggatttaacttatttataaagtaaaacaatgcaaacaaatacacggaaagtagtaaccagtgacgccaaatggcatccccatctgggtataagttttattggctgcctgcttgccattacgctagaaatatattttgaagaaagaatattcatccctcatagcggaggggtgagcttcggtctgatcgtgcttctggttatcaatatggtgaccatccctgtggtcatggccctgatagcattactctgctttattattcatattccgcgtaaaagcgttaactgtatcttgctatgcctactggcatgtattttgacgatagccggtttgtttatcgcctatccggttggtcgttgaataaaagcaggctcgtagaaataaacgagttcattgtagataaagaattcggtaattcgcattctgacctggtagtgttgtacggcatataacaccgttttcgccacggccgttcctaattcacccacgaccttctcacagctcggcggccacccggcctgggttcaggatgcggaatatccaacgtgcccaacgtgcgcgcaaacgatgatgttcctcgcacaaataagttatgaagatattgagaaatatgccgatgggatgctttacgggtttatctgcggagacaaaattgcgcgcgcttccccggaggcggcgctggcgcgccttgtccgggctaccaaccacagacagcagcgtatccgtaggcccggtaaggcgccagccgccaccgggcaattcccgacacgcgcacgttatcagcaaccggagagcctacccatcaatatcaagcccattgccgcatccgttgatgcagcgtcaacgacggtttttcggcaaataattgctgataatcggtggcaaattgccccaaatgccagaatccccactgcatcgcggcatctttcaccgtggcgctctgcgaccacgggctaatcagttcccggcgtaccgcgtttaagcgaatacgtttcagccacgcattggggccaatgcccaaaatggcgtgaaacgcattttgcagcgtgcgacggcttacgtgtagctggttacataagtcgagcaccgtcagcggctccgacatattttccagcacatattcccgcgcccgcgacagtagcctacgatatccctgatggctgatgctttcggcgctatgaatcggcttcgcctcttccagcatcgtgcccatcgccagcaacaaattatcactcaagaccttacgcaccgcaggttgatgcagggtttcaggactctcgctaaaggtggccagcgcctgctgcacaaagccccacagcgccgctttatgctgctcttttacctccagcgctaactggttacgtagcatatgcagcaccctttccgggttatgcaaaaacgtggcctgacgggaaataacatcttccgagataacgacgcccagaatggtgtaatcatccggcgtactcagttcaaactcggtgcctcccggtcgggtggcaatctcggcgctgccgagcccctgcgcgccgataaatccctgttcgccgcgcgtcgccggaataccaaaccagaaagagtttggccaaaccagacacgactgacgcagcgccaggccggtgtattcacggaacacctgaatctcatcaagcaggatttccgtgaactcgccatgaaatttacccgggtgtaactgatcgtagatctgctgccaggcggtgatagtcagagcatgttcatagacatccgtcgtccgtcgctgatgaacattgtccacctcgactctgggcgtaagtttaacgtcttcgggtaacgcttcatgataaagatggtgcaaattcgctgtacgggtctttttcatgatcttctatgccggacgcccgccaggacgcccggccctccgacagattaatttttgatgcgatagcgactactgcgtttacgcaacgctccgtcagaaaagagttgttccagcacgtttctggcctgctccagcggccagccaaaatgcgcggcaacctctcccgccgtcattccctggcgtactgatgccagcagcgccagtaacgcctcagcgaactcaggcgttgcgggtgcctggggcgctttctcagtcggcgttgtcgcacgcgcaaacccgccaatcagccactgggtgtcctcttccggacgaccaatttctttgcgactaatcacacggcctgtgcgctgcgcggcggcgcttccggcatccagcgccgcacgacacgccgccagatcgccctccaccaccagcgtgagcctgccagggtcgagcacttgatgactgagcaaacgcacgttggccgctttcagcatggcatccgccgcatcgacggcggcgaccattccgtccacttccagtaatcccagggcattgatcattggcagcctccgttacgcacgctggacagggttacgggcaatatccagcacggcgtcggtaaaggcgttgcaggcggctttacacgcggcctggcttcccgttaagaacgcggccgaatagttggtttccgacggcggcggcacgtaagtcaccagttgaacgtcagcggatttcatcgccgcgtcaatgccgaatgtcgcttccagcggcggcgccaccagataggccatcggatcgcccagcgcgatacctgcggtagacgagaggtacgagccggtacgcgaaaccacatgcgccaggaatgcggtattttccgcatcgttcgcccactggaacgccgcgccgttttcaatgctggcgaccattgcatccagaccggcgcgcacttccgccgggttcggtccgcccagcataatcaacacctcaccagcggtaggcgacggcccgtgagccgccccggcatagagggagcggccatagactacttccaccatcgcctgtttggtcgcttcgtcagcggcaatataggtcacatcatcagaatctgccgtgatgagtccgaggctacgtatatgtggcggtaatttaagttcccgcgcaaagccgtcattcacggaggcaatcacgcgcatggcagtcactgaaggtcgaatcaaatctaatgcaggcatgatgtctccttaacgggtcatgttgatgccggacgctttctgctccagcatccgtttggccaaatccacaatcacggcggcggcttctactggcggcgtccccccctgatgaatgtttgaaatacaggttctgtcggcctcgacggtggtcgccacgcgcggggaatagaccgcgtagcaggagaggctttccgactgccccagccccggacgttcgcccaccagcaggatgacgaccttcgcgccgagaatttcgccaatctgatcttcaatcttcacacggccatagcgcacaaagaacggcgtgccgacgttcagcccggcctgcttcagaccagcaagcagcggcggcaggatctcttcatagttggcggtgatcgcatccgtagagaggccatcggagaccactacctgcacatccgggttcatcacgcactgcgacttcagcgcgtcaatggcttccgggctcagacgacgccccatatccgggcgcgtcaggtacaggtttttgtcgctgatctccgaacgcacttccagcagcccttgcgcttttacccactcttccggcacttctttgagcacggtatctttcgaacgggagtgatccgccaggaagcgcaacagcgcctgggtgcgcggacgcggcccggcacgccccgtacagacgcgtgccgcagtactgcgacgcagttcggtcagcacgtccgcacgatgcggattctcgacgccaatccaggcttttgcctctgcggaacctaaatccagcgcgcagctttcggtcaccgtcggcgcggcgcactgcggctttgcgccttcctgcgttgacggcgcgacgggctgcggtacgtcctgtcccattgacgccatcacgctacgtacaatttcttcaatctgtttttgatccatggtgttatccccgcgtcatcagaagaacagtgacggatcgcccgcccgtttggtcagacgaccgtttgccataatgcccatcgtttccagccagcgttcaaactccggcgacggccgtaaattcagcaactgacggacggtggcggtatcgtggaaagcggtggtctggtagttgagcatgatgtcgtcgccgagcggcatccccatgatgtagttacagccggcagtggcgagcagaatcatcaggttttcgttaaggttctggtcggcgtcggcatggttggtatagcagcagtcgcagcccatcgagatgccgctcagcttgcccataaagtgatcttcgagaccggcgcggataatctgcctgtcgttgtagagatattccggcccgataaagcccaccacggtgttcaccaggaacggatcgtagtggcgcgccagcccgtagttacgcgcttccattgtcacctggtcggcaccaaagttcgcgccagccgacagcgccgagccctgtccggtttcaaagtacaggcagttttccccggcgatgcggttgaactccgcccccacggcccgcgcttcatcgagcatagccagctcgacgccgaactcttttaagcccttctcgctgccgcaaatgctctggaaaatcagtccgcccggcgcgccgcggcgaatcgcttcaatctgggtggtgacatgcgccagcacgcagccctgggtcggaatattgaatttatcgataacgccgtaaacggtgtcgagcacgcgggtcaggttctccacgtcatcggtcaccgggttaacgccgatcaccgcatcgcctgcgccgaaagaaagcccttcgtagatttgcgcggcgatactctgtacatcgtcacgggtatcgttcggctgcaaacggcagctaaaggtgcccggaataccgatggtggtattggcttttttgatcaccggcattttcttgccgccgtagatcaggtcagcgttggagcagattttcgctactgccgccaccacttcggaggtcagccctttgcgggtaaacgcgatgtcgtccacggaggtttcatcgctcagtacgtattcgcgcagttcgctgatgctccagtttttaatccggttataggccgtttcgttgacgtcatcctgaatcaggcgcgtcacgcagtcctcttcataggcaatcaccggattgttgcggatatccgccaccgtcatttccgacagtacctgttttgccgctacgcgctcctgcgaacttgccgcggcaaccccggccagcacatcccccgaacgcagttcgttggctttagccagtacctcttttacatccttaaactgataaacattgccgaacaatgtggtctttagtttcataagtcgttccctcaggaaggaaatgcgagtgatttcaccgtcaccggcacaaccgatccgccaaaaagaggcgtaccaatgtcgatatagtctcccgcccgcacgaccacctcatcgatgaccgccagcggaagttgcggtaactgtgggcgcaataacatgcccagcgctttaccaaaatcctgctcggccaccaccagcaggggatgtggattgggataacgcgcgacaaaagccgtcagcgcgttgatgaccgtgagtaatgcggcgtaacgcaccggaagcgtggcgggaagcgccagcacgtaagcgtcggtttgcgggtcgagatcaagctggagaagcgcctgccgccaggcgttcaccagatcggcgtcatcctgcgggatcgccaccggcaggttgcgcagcggcagttggacgtcttccagccagatagtactgccggaaagcgacagcgtatgggcccccgcgccaatcaccgtggcgcgcacggtttgcgccggaaactgcacgttcatctcgcgcagacgcgggtgctcatgcagcgcggtcgccagcagcggcccgatatcagaaaagcagaacggatcggcaggttggttgcggtagcattcacctaccccaccggaaagggtgatcacctctggcgtaatatcggcgggcagcagcccggtttgcatcagcgattgcgccagcggcgagagcgcgccagtgataacctcgacgatgagatccgccatccgccgcgccacctgtcccaactgtgcggcagctaaggcgcgagcatcagtacccgaaccgaacacctcatcgataatcatctgccccggctgatgggcataaaccacgcgcccctgagcatcggtttccagcaggcgaccaccgacgttaaggcaggcggtgccgctgacttttcccgcgtcaaacagcgcgtagttagacgtgccgccgccgatatcaatattcagcacccggcacatccgctgctcagacaagctttgcgctccggcgccgtaaccggcaatgaccgattccagatgcggcccggcgctggcgaccacaaagtcgcccagcgactgcgagagcgtcatgaccgccggacgggcgttgcgggttttggcgctttcgccggtgataatgatagcccctgagtccaccgattcaggcgcgatgcctgcggcctgatactgggccagaatcagcgctttaagttcggcctctttcagaccgccctgcttatccacgggcgtaaagaagaccgggctttgccagctaatgtcgcgtttgatgaattcgtagcgcggcacctgcgacaccgccgcacggttaaccaactccaggcgcgagaagatcacctgcgtggtggtggtgccgatatcgataccgacgctcagtagctggcgagtgttcacgattgcgcctccgcttcggttttcacctgggcggcgtcatctttcggcaccagcatcatcgccacgccaatcgccgtcacgccgccgatcagcttgccgacaatcatcgggaagatcatggcgttcatgttggcagcggcgaagcctaaatggtcgcccagcgcgaatgccgcagagacggcaaatgcgcagttaatcactttgccgcgggtatccatctgcttcatcatgccgaacatcgggatattgttcgccagggtcgccaccatgcctgccgccgcaatattatttacgttcagcagcttaccgacattcatcaacggtttttcaaaccagcgggtcagtaacagcaccatcggatacgcgccgagcagcacgcaggagatagagccgatcacttcaatggcgcgcatcacttcgccaggtttgtcgcctggcgccataaagatcgggtcgagccccggaatcaactcccagcccaacaggaatttaatcaccgcagccgccagaccgatggtgatcagcgccaccagaaatttggcgaaaatctggaaaccgttgatcattttttccgggatgaacttcagccccagcgctaccagcaccgcgacaatcaataccgggatcatgttcatcaggatcagcgcgaaggtaaactccactggctgaccattgatctgcacgcctgagtacatggcgatcaatccccccgcaatgcagccaatgggaatggtgacgatacccgccagtacgccaagcgccaggtagcggcggtcagacggttcgataatgccgagcgccaccggaatggagaacacaatggtcggccccatcatcgacccaagtattaaccctgagtatagccacgccgcgacatcaccgccggccagctctttggcgaggaagaatccgcccatatcacaggccagcagcgtacccgcgaacatggatgggttcgcgcccagcatttcgtataccgggataataaccggccccagtacatgcgccagcaccggcgccagcgcggtcataccgaccatcgccagtcccagcgcgcccatcgccataaagccctcttcaaactggccgccagccccctcgatactcttgccaaatttaccgaggaagcgcgccgacccgccgaactgcgacaggatcctgtccacggcggcaatcagcataaagaacatcatgatgtacatgatgatttcgttaattcccatagcccctactccctgtcatttttgatttgtaagccggataagacgtttacgtcgcctccggcattaacgccgtgttattgccggatggcggtgcgagcaccttatccggcctacaggcattacccggcagccgcgtacaggtcgataatctgtgcctgtgtggcggtgcgtgggttactgcgcagacaaatatcctccagcgcggcttgcgcccacgcgctgtagtgttcgggtttggcgccagcgtcagccagccgtttgctctggcccacttcggcaatcagctcgctcaccgccgcaatcgcatcgcgatcgtccgatttcttattggttaacgcccgaccgatttgactgaagcgttcgcggcaaaccatccggttaaagcccatgaccgtcggtagcagcatggcgttggcctggccgtgcggaatatgcagcgccgcccctggctggtgcgccatcgcgtgacacagccccagaccggcgctggaaaaggccattcccgccatacaggaggccaacaacatattttcacgcgccgccagatcgtggccgtaacccacggctttcggcagcgatttgccaatcatcgctatcgcgccaatcgccaggctgtcggtaaacggcgtggcgctgagcgcgctgtaggcctcaatcgcatgcgtcaacgcatcgataccggtcatcgccgtcacgtttggcggaacgccttcggtcacggcagcatcaagaatcgccacgtccggcattagtgacgcgtgtgccagcacctgcttgcgcccgctgaccgcgtcgataatcaccgtcacgttggtggtttcagaaccggttccggcggtggtcggcaccgcaatcagcggcagacgcgggcgtaatgtactgcgctcggtcatggcgctcagcgtctggtcagggttagtcaccagcagggcgaccgctttcgccgcgtccagcaccgaaccgccgccaaaggccactacgccgtcgcacgccgcctcacgcagttgcgccaccgccgcgcaaacgtcggtgatgcacggctcgcctggcggacacggccagactgtcatcgccacgcctttcatcgccaggctgcgtgccagcggcgcggtcattcccgcctgatgcaggaagctgtcgaccatcacaaacagatggcttacgcctcgcgcttgcgcttcctggccgcaggcgccgagcgccccaagtccgcacagcgtgaccggcggtacgctgaacgttttcacccgttgcagattcagggtgtcgaatgcctgaaacagcgccgtctgtagttcagcttgcatagagtccctccgctttcgctctcccgctgttggctatcgccagcggggtcataaacaggctgtgctgcggtaaatgcacctgtaactccgggaaacgctggcgaaataacgcctccacgcccggctgcatacaggaaccgcccgccagccataaatctgtcactccctgcccggcaatatggcaagcgacgatttccgccatcttttcgtacaccggcttcactaccggccaaatctcctgcgcgttgctgcgcttgtactgttccgcctcttccaggggaatacgtcggttgcccgccagcgtcagggagatatggtgcccgccagtggcttcatcggcggagtaagtcaccttgccctgtttgacgatggcaatgccggtagtgccgccgccaatatccaccacgcctgcattatcaagcgccagcagatccgccaccgccgtcggttcatccagtacgtggctgacttctaacccagcagactccagcacgttgatcgaaatacgcgggtcagtacccggtgggaacgaggtcgccgcgtgggtgaagcggcagccgagctgctgttcaagggtgtcgagatggcggcgcacgagggtgacggcaccgaagaaatcccagacgatgccgtcacgcacaacgtcggcccagtcaaggcacaccgccaccggctgggcgttgccgtcgaccaccatcgacaccacgtcgcaggtgcccaaatcgacgcccagccacagcggcgcgtcgctggcggcgggcgtctggttacacagggccgccgctttttgcagtcttggggtgagccagagttgttcgtcgtgcgccatgagtcatcccttatacaatgcgaaacgcatccaccagcacgcatcgacgcagccgcacaaaggtacgtgcgctggtcacgccttcgccggttggcgtagtgatagtcatggtggtccagccttctccgcccaatccaagcccggcaatgcacggcccgtttttgacgaaaatgctggtgtcgatggcgttcgccatctggttcatgttgtcgatattgcgcgagtgcatcgccgccgtatggtggcaaccgccttcaagctgaaccgccagggcgatggcttcttcgacgttggcgacccgcaccaccggcagtaccggcatcatcatttcagtgacggcaaacggatggttagctggcgtttccacaaacagcaggcgcgtttgatccgggacgttcaggccgatggctgcggcaatcttgcccgcgtcacgaccgacccagtcacggctgacggtacctttgccgcgttcatcgatattcttcagcagcaccggctggagctgttcggcctgagcggcggtcagtttcaccgcgtgctgaccttccatcagacgcatcagctcgtcggcgacactatccaccacaatcagcactttttcgtcggcgcagatgatgttgttatcaaacgatgcgcctttgacgatggattgtgcggcgcgcggcaggtcggcggtctcatccaccaccaccgggggattgccggcaccggcggcaatcaggcgtttattagtatgtttgcgcgccgcgtccaccaccgcttcgccgccagtcaccaccagcaggccaataccgggatatttgaacaaccgctgggcggtttcgatatccgggttcgccacggtgaccagcaaattttccgggccaccggcggcgaccaccgcctgattgaggagagtgattgcccgctgagagacctttttcgccgccggatgcggggcaaacacgacgctgttgcctgcggcaatcaggctgatggcgttattaatcaccgtcgccgccggattggtggacggcgtgaccgaggccaccacgccccacggcgcattttcaatcagcgtcaggccgttatcgccggtcagcacctgcggagataaacactcgacgcccggcgtgccgcgcgcctgcgccacgtttttggcaaatttatcgtcaacgcgtcccatgccggtttcgctgacggcaagttccgctaattctcgggcgtgtttttcgcccgcttcgcgaatggcatgaatggcaagctggcgcatcgccacgctcttcagcccctgctgggcccgttttgctgccgccactgcgtcatccagggaggcaaaaacgcccatctcatgaacagtactggccggctggctgctgtctttcattttcagcagcaccgctttcaccacctgttcaatatcctgttgattcatgatgttcagtcctatttatggaaaaccactttcccgccagccaccacttcatcgacgatgccaatgacgcacagatcgaccggtgataattcgctgcgatgcgcctggcgcgcggaactgccgctgaccagcagtacccactctccggttcccgccccgatactgtcgatagcgacggcacactgcccgtcggggttgccctgggcatcgatcatttccaccatcagcaatttgtcatgcgccagtccctgatggcggacggtacatacgatttgtcctgtgacgactgccagtttcatatccgcctccatggattgcccattgggtcgtaggccttgaatctgcgcaccatcaggcaatggcgcgcattcatgccggatggcgacgctgcgcgtcttatccggcctaccatcaaatgttgctgtcgcctttgaagctgatcgggaacacttcttccagatcgccgtgcgggcgtggaatcacgtgtacggagaccagctcgccaatgcgctgcgccgcagcggcgccagcatcggttgcggctttgcacgccgccacgtcgccacgcaccatggccgtacacaggccaccgccaatctgcttcacgccgaccagcttcacgcgcgcggcttttaccatcgcatcggaggcctcaatcagcgcaaccaggccccgggtttcaatcattcctaatgcttccatcgtgttttcctctcattaaaggggtccagaacgggaccgttcattcaaccagtgtgtgtaagctgcgttcgcggctcacgtcagcctggcgcggcacggctgccaccaacgccagttcgataatttcctgcacgctacagcctcgggagaggtcgtgaagcggcgcggcaagcccctgaattagcggcccaacagcgcgatagcctcccagacgctgagcgattttgtagccaatattgcccgcctccagcgacgggaaaatcatcacgttggcgcggccttgcagcgggctgtcaggcgctttttgcgcggcgacctccgggacgaaagcggcgtcaaactgcaattcaccgtccacaagcagttgcggcgcacgttcgcgaacgagctctgtcgcctgctgcacgttggcgacattggggtgacgggcgctgccgttgcttgaaaatgacagcatcgccacgcgcggctcttcgccggtaatggcccgccaggtgtcggcgctggcgatagcgatatccgccagctgcgccgccgtcggctgcggtactacgctgcaatcggcgaaccctaatgccggaccggcatactgcggcagcatcaggaaaatagacgacaatgttttgcacccaggttgcaggccaatcacccgcagccctgcgcgcagcacattcgccgttgacgacaggttgcctgcgatacacacatcagcctcaccggcgctcaccatggcggcagcgaacatcagcgggtcgctaagcttttccactgcgtccggcggcattttttctccggcgcgggcaagccagcgttgcgcaaaacgctggcgcatactcaggttgctgtgtgggtcgatgacctgaatgccatccatcggcatacgatgactcagggcaaactgacgcagcgcaaacgggctggcgaccagaacggggcgagccagaccgtactgttgcaggtaatgcgccgctttcagcacgcgttcgtccagcgcatcaggaaagacgactctggcgggggcgcgtaccgccagttcgcgggcgcgttcaatgatcatggcttctctcccaaccgttgttgaatttgggcgaccgtcagcggatgtttcgccacgctcaaaatcatcatcacgtaaaccgtgctggagagacggttcagcgcctgtaaaatgtccgggcgcaagacctcaaaactacgggtaataaacacttgtgcggcgagggtttccgtttcgcggactttggttcgcagcagattaagcagcgccgcatcgcgaccgtggctggcctccggcaccaggtgatcgtggtcgaggtagcgcagcggctggtgggaaagccgatgcagctcatcctcgttgagcccgacgatcgcctgcgccgccagcggttcatctatagcgtcggcgcgcataatgttgcccagccgcgagcggatatcgaaaagccacggctgccagggttccgccagttcgatttgtagccacacggtcagcgcgatggcgctgtcgagcgcggcgcgaaagccgaggcgcgggtcgcttttggcgaccattttgtccgccgtcagatgggtcagcgtatcgggctttttcaccaccggctggcggcacagttcacagcaggcctgtgggtgcgtatcgctactggttaagccatgtaccggctgcggctgctgttcgtcatcatcgacaaacagcctgccttgcggatccagaaacttaatgcgcaggcggcgactttccagcagttcccgggccgagggcgtcagtcgtgcatcagcgggcagatggatctccgatccttcgctgagcgtatgattcgctctgagccacgtttcggtgatgaaatcgttcatacggattgccagttcgcaggccaggcgacgtacagaaagcgcacggacgttggcgtgccaaattcaatgctggagcctttagggatgaacatgacatctccggctttggcaatcatggtttcgccttcatggcgtacgtgcagttcgccctccagcaccatgtcgatttcgtcgtagttcagcgtccacggaaaaaaggcgttgtcccactgcataaacccggcggccatgctgctgccgtcctgctctgtaaccagatcggttaagccgacgcagtgcggttcggcgccgtcgaagcggccaaatttcacgctgctgccgtcaatgactttcacgccgcctttacccgtgacggaggtaaagctcggctgcatcgtccccagttccaacgactgcttttccttcagcactttttccatcaactgcgccaccaggctttcagtaaactgcccttccgggagctgcgcgatgatggcttcccgaatgcgctggctttcgtttttacacgcctgcgccgatgtggatgccggaacggactcgtcgcattcggtaatcgtgaagcccagtagttccgccacttcgcgagcctccggggtaataatgctggcgcgcagcactaccgacatcgcctgttcgccgcgggcgtgggccgcacgaatatcgttagctgtgataagttttttcacctgcctcttcctcctgttcactgagagccgccagataatccaccaactgccgcacgctttgcgggtcgtggccgttgagctcgaaaatcggctcccggaatccaatctcgcaaagcaactgccgcgtagcggcgacgtcggcatccggcatgtccgttttgctgataacggcgatatgtcgtttacgggttccaacatccaataacccggcaggtaagcgactttctttatcgtttgccgcgtggacataaatcagcgtgtccacatcctgcaacgtggtaattaaggcgtgataccaacggggatggctaaaatattcacccggcgtatcgatatcgccatgatcattaaattccacggcctgcgtttttctggcgagggaataatttccccgtaacgcgttaaaaagcgttgtttttccggcaccgaccgcgccgacaaaagcaatacgtttcattaccgccaccaattaactttttgttaactcacacagggtaaagtttaataatcgccccagcccgctgaccgtctgtaatagcgcttcttctactgcgccgacggtgccataaatcaccagcgcgccgctaaatctgtcgagaaaaccgatgtgtacatccgcagccttcatcgctaaatcgccagcgatcatcgccgtttcccccggcgttaaggtcataatgccaatcgcgccagcatcgggaacgccgatctttttcgccagttcttcaccagggtgcgcaatgagatgcgccagagtgacctgtttgcccggcacaaattcctgaataatgcgttctttattcattgctcaccgtctccactgaaactgccgtcatcgtggcaattttttgtcggagtaaataacaaaattcggcaaggtgatgtaaaaggtgaggtagatcactaagagaaagaaaataaaagggacttctgtcgaaggtgttaacgataaatatcgtggtgcatcacattttcaggcgtcattctgaatttaagcctgttccgcaataaatacccaccgactattctttatattactattattgataaaaataatgcgtatcactcgatttgtgcatagtacagattcagtgaaataagtaggggtaacgcaataggttccagaatatccccactcgagcctttcatgccatggcgaagcccagcggcgcataaaaaaagcgcaggagaacctgcgccagaagagagagtaatacgttattaaagcggcgtggtttgcgcttcaactaccgctaacgccaccatattcacgatacggcgtacagaggcgatcggcgttaatacatgtaccggtttagacacgcccatcaggaccgggccgaccgtgacgccttcggaactggagacgcgtagtaagttgtaactaatgcgggcggcttccatattcggcatcaccagaatattggcggctcccttcagcgggctatccggcatccggtcattacgaatactttccaccaacgccgcatcaccgtgcatctcaccgtcaatcatcagatcgggcgctcgttcgcgtacccgctcaagggtttcgcgcattttgctggcggacagcgaatttgaggaaccaaagttagagtgcgacaacagcgcgactttcggctcaataccaaagcggcgaacggtttccgccgccattacggcgatctccgccaactgttccggcgtgggatcttcgttaacataagtatcggcgataaaagtgttgccgcttggcagcagtaaggcgttcatcgcccctgccgtatgcacgccgtcacggtagccaaagacggctttcacgacgctgaaatgctcatggtagtcgccgatggtgccgcagatcatcgcatccgcttccccacgctgcaccatgatcgcgccaatggccgtatggttgccgatcatcgcacgctgcgcctgttcctgagttaccccgcgacgcttcatgatctggtaatactcgctccagtactctttgaagcgcggatcggattcattattcacgatctcgaaatcaacgcccgctttgatctgtagccccagtttctggatacgcatttcgatcacgctcggacgtccgatcaggatgggcttcgccagtcccagggttatcaactcctgggttgcgtgcagcacgcgcgcctcttccccttccggcagcactacgcgcttcggatctttgcgtgcctgcgagaagatcggcttcatgaacaggttggttttgtagacaaactcggtcagtttatcgatataggcatcaaagtcagcaatcgggcgcgtcgccacgccggaatccattgccgctttcgcgaccgccggagcgattttgacaatcagacgcgggtcaaacggtttcggaataatgtattccggcccaaagctcaggtcctgatcgccataggccgaggccaccacttcgctctgttcggcgtgcgccagctcggcaatcgcacggaccgccgccagtttcatctcttcgttgatcgccgtcgcgccgacgtccagtgcgccgcggaagataaacgggaagcacaatacgttgttcacctggttcggatagtcggaacgaccggtacagatgatggcgtccggacgcacttctttcgccagcggcggcagaatttccggttccgggttagccagcgccagaatcattggcgcgcgggccattttcttcaccatctcctgagtcagcactttcgggcctgaacagccgaggaaaatatccgcgccgtcaatgacctcatccagcgtgcgcttgccgctgtcgtctaccgcataggccgctttggtctccgccatattcggctcacggcctttgtaaataacgcccttagagtcgcacaccacgatgttgtgcttttgcatccccaacgcgaccagcaggttcatacaagcgattgccgccgcccctgcgccggagacgaccatccgtacgtcggaaatatttttctctacgactcgcagaccattaagaatggcggccgtactaatgatcgccgttccgtgctgatcgtcatggaaaaccgggatgttcatgcgctcgcgcagtttctgttcaatatagaaacattccggcgctttaatgtcttcgaggttaatgccgccaaaagtcggctccagcgctgcgaccacattgataaatttgtccgggtcaagctcatcgacttcaatgtcaaacacatcaatgccggcgaattttttaaacagaacgcctttgccttccatgaccggcttgccggccagcgcgccaatgttgcctaaccccagcaccgctgtaccgttggaaatgaccgcgacaaggttgccgcgcgcggtgtatttgtaggctgccagcggatctttttcgatttccaggcagggcgccgccacgcctggcgagtaagccaacgccagatcgcgttgggtggcaaggggcttagtcggagaaacctgaattttaccgggtaccggaaattcgtggaaatcaagggcgctttgttttaactgctcatccattttgttgttcctttcacgtatcgttcaaaaagtgacgcggcctggtgcgccgcacattatcaccgtactgcgcaacacaaactttgaaggtctgcaaactatcacgacgcggcgcaagagtttgttatcaacttataacggccatgttacctgcttataccagcaataccatgcctgtctgctatgctttttggttatgtagtgtatcaatctttcagaagtgtgaatcaacacactcatctaacactttacttttcaaggagtatttcctatgaaccagctagacggcatcaaacaattcactaccgtcgtcgccgatagcggcgacatcgagtccatccgccactaccagccgcaggatgccacgacaaatccctctttactgttaaaagccgccgggcttgagcagtatggtcatttgattgaggatgcgattgcctgggggaaaaaacacggcggtacgcaggaacagcaggttgcggcagccagcgataaactggcggttaattttggcgcggaaatactgaaaagtattcccggtcgcgtctccactgaagtcgacgcgcggttatcgttcgataaagaaaaaagtatcgagaaagcgcgccatctggtggatctctaccagcagcagggtgttgataaatcacgcattctgatcaagctcgccgcgacctgggaaggtatccgcgccgccgggcagctcgaaaaagagggtattaattgcaacctgacgttgttgttctcttttgcccaggcgcgcgcctgcgccgaagcgggcgtctatttgatctctccgttcgtgggccgaatttacgactggtatcaggcgcgtagtccgctggagccgtatgtcgtggaggaagatcccggcgtgaaatcggtacgcaatatctacgattactttaaacagcatcgctatgaaaccatcgtgatgggggcaagtttccgccgtactgagcaaatcctcgcgctaaccggctgcgatcgactgactatctcccctaacctgcttaaagagctgaaagaaaaagaagaaccggtgatccgtaaactggtgccttcctcgcagatgttccaccgtcctacgccaatgacggaagcggagttccgctgggaacataatcaggacgcgatggccgtagagaagctgtcggaaggtatccgtctttttgccattgaccagcgcaaactggaagacctgcttgccgccaaactataaaccttgcatggagtgatttatgtcccgtaaagaccttgccaatgcgattcgtgcgctgagcatggatgccgttcaaaaagccaattccgggcaccccggcgcgccgatggggatggcggatatcgctgaagtgctatggaacgattttcttaaacataaccccaccgatccaacctggtatgaccgtgaccgttttatcctttccaacggtcacgcctccatgctgctctatagtctgctgcatttaaccggttatgacctgccgctggaggagttaaaaaacttccgtcaactgcactctaaaacgccaggtcacccggagattggctatacgcccggcgttgaaaccaccaccggaccgctgggccaggggctggcgaatgccgtcgggctggcgattgccgagcgtacgttaggcgcacagttcaaccggccggaccatgagattgtcgaccactacacctatgtctttatgggcgacggctgtctgatggaggggatctcgcatgaggtgtgttcgctggctggtacgctgggactgggcaaactgatcggcttttacgatcacaacggcatctccattgatggcgaaaccgaaggctggtttaccgacgataccgccaaacgttttgaagcctaccactggcatgtcgtatatgacattgacgggcacgatccggaggcggtgaaaaaagccattctcgaagcccagagcgtaaaagataaaccttcgctaattatctgtcggacggtgataggttttggctcgccgaataaagccgggaaggaggagtcgcacggcgcggcgctgggcgaagaagaggtggcgctgactcgccagaagctgggatggcatcatccggcgtttgagatcccaaaagaaatttaccgcgcgtgggatggccgtgaaaaaggcgagaaagcgcagcagcagtggcaggaaaagtttgctgcttatgagaaggcttatcctgagctggccgcggagtttacccgccggatgagcggcggactgccggaggcatgggaatccgccacgcaaaaatttattaacgacttgcaggctaatccggccaaaatcgccacccgtaaagcatcgcaaaatacgctcaatgcctacggtcccctgttgccggaactgttgggcggatcggcggatctggcgccgagcaacctgactatctggaaaggttcgacctcgttgaaagaggatccggcaggtaattatattcactatggcgtgcgcgaattcggcatgaccgccattgccaacggcatcgcccatcacggcggctttgtaccgtataccgccacgtttctgatgtttgtcgaatatgcgcgtaacgcggcgcgtatggcggccttaatgaaagcccggcagattatggtctatacccacgactccatcggtttaggcgaagatggcccgacgcaccaggccgtggaacaactggcgagcctgcgcttaacgccaaacttcagcacctggcgtccctgcgatcaggttgaggcggcggtcggctggaagctggccattgaacgtcagcacgggccgacggcgttgattctctcgcggcaaaatctggcgcaggtggaacgcacgccggaacaggtgaaagcgattgcccgcggcggttatattctgaaagatagcggcggcaagccggatatcattctgatcgctaccggatcggaaatggaaattaccctccaggcggcggaaaaattgactggcgaggggcataacgttcgcgtggtgtcgttgccttcaacggatattttcgatgcgcaggacgaggcatatcgcgaatctgtgctaccggcgcacgtgaccgcccgcgtcgcggtggaagccggtatagccgactactggtataaatatgttggcctaaaaggcgcaattatcggcatgacgggatacggtgaatccgccccggctgacaaactgttcccgtattttggctttaccgtggaaaatattgtagaaaaagcccgccgggtgctgaacatcaaaggctaaggcgagcgttagcaacacagactttgcacagtctgcagacctgttctgtaggctgtgcaaaattacttcgtagactcaggcgcatctgactgcccgatgacgacctcatcaatggatttatggcacatcaggcaaaaggccttttttttatgcgcctgcaatgttgaatcccacgccgctgatccaccttctttattcactttttctcttatcgccgccagccgatctatttcataataagcgctcaggcagccacaatgggggcataatacggggccattatttattttcatactatttcctgctgtggtgaggctatcgggtaaagtaacaatcctaccgtaacgtagcaatctctataccataaatgaaacctcaataggtgtatccctattctgaaaaggggataacaaccaggattcaacgcgtgatccacagcgtaggccaggcatccggcccgtgccagctatcgcagctcggttcttcggcataacgcaccagacgaaaacgatcgccatcataacgccagcgcgtctggataccgcagtcggttaacccccgccctttcgccaacgtcaccagttcacgcgttttctcgtcaaagaaggcgttcatcaactccatgtcattactttcgacgccgcgattaaacggcagccgcaaacgtacggcgcgcgagacgagcgtttttttgcgtgaaactacccaggcgagatcaatagtgttataggcgccggcttcgcagttaacaatcaataacgctttatcatccgtcaacgcgctgacctgcgtctcgcgacgcagcgggtcaagcgaacaacgaatgccgtttacccgccatgctgcgtagtccagcagatcgtcgcgttcttcctcactcagcggtacgggcgttggattaatcacggcgatcccctttaatgccggtgccgggggcacgctgagaggcggttcgtttcctttttcaatccaggcggtttcgctgcccacacgtttttgttgcgcgtcgataaacagtaatgccgcttttaatcccgccagcgaaagcgtctgaacgccgttttttaaggtgatggcctgcgcatcctgaatcgtctgtaaaaatgcggtgatggtggcaggatcgccggtcatgagatgccagggcgacacgcgccagtgtggactgttgaacgaaagcggtttgccatccagcaataagcgaggcgcaattgcggcttctttagcgtcgggcggcgccaaaccgccacgatcgatacgcagtaccgcatcggtacgcgccccggcgctgcggcttaatgtcatcaccagcccatgatgttcgccagtattgcgcgctacgcaaaaattttggttattgcaggtgacctgccagtcggaaaaagtccgttgcgctggcgcagcccacagtagctggaccggcaacaggccaaacagacaaaaaagaataacgcggtagcgcatgaacggaacaaccccagattcagaacaacacagctaaggcggtatcttccttgcgcgcctcagggttctcaatcagatttatcggattggtcttttttgtgtaaagaaatatatttcttttttttcagtccattagatgagacgtctgtaaatagttaagcaataacacggtcttaccgtcccgaatctcgcctgagcgcaccatttccagcgcccgggaaaacggcagttcaagcacctcaatctcttcgtcctccacgccgccgccgatgctggcacgctcgctatcatgatattcggcaatgaagaaatgaatcagctccgtgacgccgcctggcgacatatacagctcaaatatcttgcgtacctcaccaacgtcataccctgtctcttcaatggcctctttacggatacagacctccggctcgtcgttatcaagcaggccagcgcaggtttcaattaacataccgtcttgattaccattgacccatgtcgccacgcgaaactggcgaaccagaaccacggtttttttagttgagttgtaaagcagaatggttgcgccattcccgcgatcgtaaacctcacgcttgtgacggataacctcgccattacgacgggtcaggtcataggtaatgttgcgcagagtaaaataattatcagaaagaattttatccttaataagcgtaatggtttgcgacatgctggctccagggtgtaaaaagagcattaatattacgccgtgaggtcggttttgtctgctgaagggttaatccttaatgccgactgaacggatgtacagccatatttttctgtcactgccatgaccatattctgcttctccgggccgcagagtccatgctcgcgatatgatttgacggccggagtgagactgagggaatcatcatgaaatttactctcgttgcgacggttctactgacgttttccctttcagcttttgccgttgagtatccggtattgaccatcgcgagccctgatcaggtggggtttgatagccaaaaacttcaccgacttgatggctggattcaaaatcaaattgatgccggatatcccagcatcaatcttctggtgataaaagataatcatattgttctacaaaaagcctggggctatgccaaaaaatatgacggttccacgctgttagcccatcccattcgggcgaccactaacacgatgtatgatctggcttcaaacacaaaaatgtatgccactaatttcgcattgcaaaaactagtgtatgaaggaaaaatagatgtcaatgatttggtatcaaaatatatccccggctttaaggatatgcctggggataaaataaaaggcaaagataaactccgcattattgatattcttcatcacgtcgcgggctttcctgccgacccacaatatcccaataaaaacgtcgccggtaaattattttcacagagtaaaagcactactctggagatgattaaaaagacaccgctggaatatcaacctgggtcgaagcatatctacagcgacgtggattatatgattcttggttttatcattgaatcgataacggcaatgccattagatcgctacgtcgaaaccaccatttataaaccgctcggattaaaacataccgtctttaacccgctgatgaaaggcttcacgccgccgcaaatcgccgcaacggaactacacggcaatacgcgtgacggcgtgattcatttccccaatattcgcaccaatacactatggggccaggtgcatgacgaaaaagcctggtactcaatgggcggcgtttcaggacacgccggactgttttctgacacccatgatatggctgtgttaatgcaagtcatgctcaatgggggcggctacggtaacctgaagctattcgacgacaaaacggttgcgcagtttactcgccactcgccagaagatgctacctttggtctggggtggcgcgttaacggcaacgcctcaatgaccccaacgttcggggtattagccagtccgcaaacgtatggacataccggatggaccggaacgctgacgtctatcgatccggttaatcatatggcgattgttattttaggtaacaggccgcactcgccggtagcaaatcctaaagtgaacccgaatgtttttgtcagtggattattacctgcggcgacgtatggctggattgttgaccagatatatggttccttaaaataaaaattaagagcctatctctgtaggcgttattggcgcagccagtttggacacggacagcgcgcaaaaaccggagcgtacacgtagtacgtgaggtttgactcgctacgctcgcccttcgggccgccgcaagcggcgttcaaaacgctaatgcgttttggcgagcactgcccaggtccaaaatggcaagtaaaatagccctaatgggataggctctaagaagggattctgatagcgtcccttccttcaatttacactctattttcaatactaagattggcctcatcaggcctgttaaacgtcgacccgacgggaaaatgtttatcgcagggcgttcagccctgcgagcgtcaacatttctgcaaacggagtaaggttagccaataagtttaagattttttatcactcaatcatttaaccgttccaggccttaaccggcctacaaatacgcttatttagctaaccagtcgagtatcccctgcgcagcatgtcggccttctgccatcgccgtcaccaccagatcggcgccgcgcaccgcatcgccgccggcgaaaattttcgggttggacgtctggtaacgaaactcgctctcgacgctggcggcaatacgtccccagttatccaccttcacgccatgcgattcgagccacgacataccatgcggatgaaaaccaaacgccataatgaccgcatccgccggcatcacgaactcgctgtccggtacaggtaccgggcggcgtcgcccctgaccatccggttcgccaagccgcgtacgcaaaaagcgaataccgctggcgcgcccgtgcgtatccagcaccaactcaaccggctgaacgttaaattcaaagttcgcgccctcttcccgcgcgtttttcacctcttttttcgaccccggcatattggcctcatcgcggcgataagcgcaggtgacgttagcagcgccatgacgcagcgccgtacgtacgcagtccattgcggtgtcaccgccgcccagcacaaccacgttaaggcccgcagtatcaataaacggctcgtcaggcaacgccggaagccccatcacctgtttggtattggcgatgaggaatggcaacgcatcatatacccccggcgcatcttcattcggtaaatcagccttcatggaacgataggttccaaccccaacaaagacggcgtcataactctccagcagcgtctccagagaaatatctttccctacttcgcagttaagctcgaaacgaatccccatcgcgctgaagatttcccgacggcgcgccagcagagatttatccagtttgaaagccggaataccaaaggtgagtaaaccgccgatttccggatggcgatcgtagacggtggcgcttacgccatggcgcgccagcacgtcagcgcaggcaagacctgccggccccgcgccgataatcgccacgcgcttatcgctcttctgtacgtccgacaggtcgggacgccagcctttgctcagagcgcgatcggagatatagcgctcaatgttgccgatggtaaccgcgccatactcatcgcggagtgtacacgcgccttcgcatagccggtcctgcggacagacgcgcccggtaatttccggcagacagttggtctggtgggaaagctctaccgccgcatcaatatcgccggctttcaccagttcgatccactggggaatatggttatgcagcggacaggtccattcgcagatactgtgttccccgcatgtgaggcagcgggccgcttcacgctccgcctgcgcggcgcgaaacggcagataaatttcctcaaaggtggttttacgcgcttcaatcgccagtttatccggttcgccgcgcggcggcgtcgcctgcatacgctcgactttgctgcttgctgtcccactgtgttgtgtatccacggtatgccaggggcgaatctcctgccgggcggtacgcagccgtcgcgttttagccagacgggtcaacgagtcttcggtgaccagttgcagcgcatccgccgggcaattttccacacaggccggaccctgttcacgtccctgacacagatcgcatttatgcgcgctggctttgaactggtttggcgcgacgggcgtcaataccatctgcatggtgccgaatgggcaggcgacgacgcaggatttacagccgatacacttctgcgcattgacctgcacgctgtcgttaatatgcgcgattgcgccgttcggacagctacgggcgcagggcgcatcttcgcaatggtgacatgtaaccgcgctgcgctggcgctgatgtttgatgacagtaattcggggctgatagcgctgtggcgtcaggacatgtcgctcatcattgtgagccattacgcaggcgacctcgcaggcatggcagcccagacactgctggctattggccataataaaacgattcatggcatccttctgttttggttgtaaaaaccttattctttatatgagcattgttattaactgacgaaggcggggtcggcaatgttcatctgcccaggaagcacaactatctgtccagaacctgtggcagatcaatttatttcaaagcaaatgcaattgcgattcagctaaatgcggggagtgccagcgtgacggttaaacgcccggtctcagccagtctggctaaggcttttttctatattgtgctgttgtctattctgtccaccggcagcgcattactgacgctgaccagcagtttacgggatgccgaagcgatcaatatcgccggttcgctacgaatgcagagctatcggctgggttacgatctgcaaagccgtagcccgcagattaatgcgcatcgtcaacttttccagcacgcgctcaactcgccggtactgcaaaatctcaacgcctggtatgtgccgcaggcggtgaaaactcgctacgcgcgcctgcacgccaactggctggagatgaatagccgcctacaggacggcgacattgcctggtatcagaccaatatcaacaattacgtcgatcaaattgatctcttcgttctggcattacagcattacgccgagcgtaaagtcatgctggtcgtcgccatatcgctggcgggcggtatcggcatatttacgctggtcttttttaccctacgacgtattcgccagcaggtcgttcgcccgctgaatcaactggtcaccgccagtcagcgaattgaacatggtcagttcgccccgctgccgctggataccagcttacccaatgagctgggattgttggcgaaaacgtttagtcagatgtcgagcgagctgcataaactttatcgttcgctggaagcctcggtggaagaaaaaacgcacgatctgcacgaagcgcaccgccgcctggaggtgttataccagtgctcccaggcgctgaataccagccaaatcgacgtccactgttttcgccatattttgcaaattgtccgtgaacatgacgccgcctggtatctggagttaaccgtgggcgataactggcggattagcgaaggcatgcaaagccccgacctgccgatgcaaatgctgccagtgacgatgcaggacacggtctatggcgaactccactggcaaagccccaacgttaatgcctctacgccgctgctgaacagcgtctccacgatgctggggcgtggtttgtactttaatcaggcgcaaaaacacttccagcaacttttgttaatggaagagcgcgcgacgattgcccgtgagctacacgattcgctggcgcaggtactttcttatttacgtattcagttaacgcttttgaagcgcgctattcctgaggataacgccggcgcgcaaagcatcatggcggatttttccagagcgctgaacgacgcctaccgtcagcttcgcgagctactcaccacgttccgtctgacgttacagcaggccgatttaccctccgcattgcatgagatgctggaagatttacagagtcagactccggccaaactcacgttggattgccgtttacccacgctggcgctggatgcgcaaatgcaggtgcatttattgcaaattgtgcgtgaagcggtcctgaacgccattaaacacgccaacgcgagcgaaatcgccgtgagctgcgtcaccgcgcctgacggcgatcataccgtttatattcgcgataatggcattggtatcggcgaaccgcatgagcctgccggacactatggtctgaatataatgcgtgagcgcgcggagcgccttggcggcacgctgaatttttcgcaaccctccggcggcggcacactggtcagtatcagttttcgctcctccaacaaggaagagagtcagttaacgtaaagaacggcaaatcgccggaaggccagatgtcaggctttccggcgttggcacaaaaagtatgctgtaaaagcgcatgataatttacattatctcctttatttctccacgtttggctcgtagcttgccgctacagtgaagcagttcaaatctataacgatatgtagaaacacgaggttcccctttaatggcgaatttttttatcgatcgccccatttttgcctgggtgctggctatcctgttgtgtctgacaggggcgttagccattttttctttacctgttgaacaatatcccgatctggcaccgcccaacgtacgtattaccgcgaattatccgggagcgtcggcgcaaacgctggaaaataccgtaacccaggttattgagcagaatatgacgggcctcgataatctgatgtacatgtcatcacaaagtagcggcaccggacaggcgaccatcaccctgagctttattgcgggaaccgatcctgatgaggcggttcagcaggtgcaaaaccagttacagtccgcgatgcgtaaactgccgcaggcggtacaggatcaaggcgtcacggtacgcaaaacgggcgataccaatattttgaccatcgctttcgtctctaccgacggttctatggacaagcaggatatcgccgactacgtcgccagtaatattcaggacccgctcagccgcgtcaacggcgtcggcgatattgacgcttatggttcacagtactctatgcgtatctggctcgatccggccaaattgaatagttttcagatgaccacgaaagacgtgaccgatgcgattgagtcgcagaatgcgcaaatcgccgtcgggcagcttggcggtacgccttcggtcgacaagcaggcgctgaacgccaccattaatgcgcagtcactgctgcaaacgccgcaacaatttcgcgatatcaccctgcgcgttaatcaggacggttccgaggtcaaactgggcgatgtcgccaccgtggagctgggggcggaaaagtatgactacctcagccgttttaacggcaatccggcttccggtcttggcgttaagctggcttccggcgcgaacgaaatggcgaccgcgaagctggtgctggatcgcctcaacgagctggcgcagtacttccctcacggcctggaatacaagatcgcgtatgaaaccacctcctttgtcaaagcctcgattatcgatgtggtcaaaacgttgctggaggctatcgcgctggttttcctggtgatgtacctgttcctgcaaaactttcgcgccacgctgattccgacgatcgccgtgccggtagtattaatgggcaccttctccgtgctttacgcgttcggctacagtattaacacattaaccatgttcgcgatggtgctggcaatcgggctcctggtcgacgatgccatcgtggtggtggaaaacgtcgaacgtatcatgagcgaagaagggctcacgccgcgtgaagcgacgcgcaaatccatgggacaaatccagggggcgctggtcggtatcgcgatggtgctgtctgcggtattcgtgccgatggcgttctttggcggtaccaccggggcaatttatcgtcagttttctattaccattgtctcggcaatggtgctgtcggtgctggtcgccatgatcctgacaccggcgctgtgcgcaacgttattaaaaccgctgcacaaaggcgagcagcacgggcaacgcggatttttcggctggtttaaccgtaccttcaatcgtaatgccgaacgttatgagaaaggcgtagcgaaaattttgcatcgcagcctgcgctggattctgatttatgttctgttgcttggcggaatggtgttcctgtttttgcgcctccccacctcctttctgccgcaagaagatcggggcatgttcactacgtctatccagctaccgagcggctctacgcaacagcagaccctgaaagttgttgaaaaggttgaaaactattacttcacccatgagaaaaacaacattatgtcggtcttctcgacggtcggttccggccctggcgggaacgggcaaaacgtcgcgcgcatgtttgttcgcttgaaagactgggacgcgcgcgatcccaccaccggctcctcgttcgccattattgagcgggcgacaaaagcatttaaccagattaaagaagctcgcgtcttcgccagcagcccgccggcaattagcggtctgggcagctccgccggttttgatatggaattacaggatcacgccggagcaggccatgacgcgctgatggccgcacgagatcaactcattgagctggccgggaaaaacagttccttgacccgcgtgcgccacaacggcctggacgacagcccgcaactgcaaattgatattgaccaacgaaaagcgcaggcgctgggcgtatcgattgacgatatcaacgacaccctgcaaacagcctggggatcgagctacgtcaacgactttatggaccggggccgcgtgaagaaggtctatgttcaggccgcagcgaaatatcgtatgttgccggatgatattaatctttggtatgtccgtaacaaagatggcggcatggtccccttctccgccttcgccacctcgcgctgggaaaccggctcgccgcgtctggaacgctataacggctattcggcggtagaaattgtcggagaggccgcgccgggagtcagtaccgggactgcgatggatgtcatggagtcgttggtgcatcagctaccgggcggttttggcctggaatggacagccatgtcttaccaggaacggctctccggcgcgcaggcgcccgcgctgtacgctatttcgctattagtcgtcttcctgtgtctggcggcattgtatgaaagctggtcggtgcccttctcggtgatgctggttgtgccgctcggcgtcattggcgcgctactcgctacctggatgcgcgggctggaaaacgatgtttacttccaggtggggctgttgaccgttatcggcctctcggcgaaaaacgcgattctgattgtggaattcgccaacgaaatgaatcagaagggacacgcgctgttagacgccacgctgtacgccagccgccagcgcctgcgaccgatactgatgacttcgctggcgtttatctttggcgtattgccgatggccaccagcaccggggcaggctcgggtagccaacatgctgtcggaaccggcgtgatggggggaatgatctcagcaaccattctggctatcttctttgtacccctgtttttcgtgctgatacgccgccgcttcccgctgaagccgcgcccggaataagctcccggccagcctgatacgaggtgtcgggcacaaaaaaggcgactttcgttgagtcgccttttcttatcccctatgggagcgcggtgccttccaggcatttatttacgaagcatgacttcgataaaatctttccagttccccagttcacgttcaatcataatagcctctcttattattatgggtattctacgtagttagcggtatagagagaagttcatttaaccgattgttgcgatatcctctggttatgctgtctatgatattactatggcgctgtagccgtaaattttatgtgacttactgcaatatttagcaacattaataccttttctactactttatcaaatcgggttaaaaaacaatcaattgcatgtgcgcaaaataggattttcctcgcgaattataaacaagccacatctggaacgttttggaatcattattcacattcactcaacaatgttatattgattgccgatcagcgctggataaataaccattaacagccacacttattatcccgcagacgatactattgattatttattcgaatttcgcgttaaaggattcaatatgattaccctctatggcattaagaattgcgacacgatcaaaaaagcgcgccgttggctggaggagcatggcattgattatcgttttcacgattaccgtgtggatggcatagacctccctcttcttaatacctttattgccgaactcggctggcagccgttactgaatacgcgcggcacaacatggcgcaaactggatgaaggcgaccgcagcgggattaccgatgccgactccgccgctgctctcatggttgaacagccggcaatcatcaaacgcccattgctctgcgcgcccgggaagcctatgctgcttggtttcagtgaatcccgttatcagcagttttttgatgaggtgtagtctatgtcgtgcccggttattgagctgacacagcaacttattcgtcgcccctccctgagtccggatgacgcaggctgtcaggcattaatgattgaacgcctgcgtaaaatcggttttaccattgagcatatggattttggcgacacgcaaaatttttgggcatggcgtgggcgtggcgaaacgctggcgttcgccgggcatactgacgtcgtaccggctggcgatgtcgatcgctggatcaatccgccgtttgaacctacgattcgcgacggaatgttgttcggtcgcggcgcggcggatatgaaaggttcactggcggccatggtggtggctgctgaacgttttgttgcgcagcatcctcatcaccggggccgcctcgcatttttgattacctctgatgaagaagccagcgcaaaaaatggcaccgtaaaggtggttgaagcgctgatggcccgtaacgagcggctggattactgtctggtcggcgaaccttccagtactgaaattgtgggcgatgtcgtcaaaaacgggcgtcgcggttctctcacctgtaacctcactatccatggcgttcaggggcacgttgcctatccgcatctggcggataaccctgttcatcgcgccgcgccttttcttaatgaactggtcgctatcgagtgggatcggggcaatgactttttcccggccaccagcatgcaggtagctaatatccaggcaggcaccggcagcaataatgtcattcccggtgaactgttcgtgcagtttaacttccgtttcagcacggaactgaccgatgagatgatcaaagagcgggtacatgcgctgcttgagaagcatcagctacgctataccgtagactggtggctttccggccagccgttcctgaccgcacgcggcaagctggtggacgcggtggtaaacgccattgagcactataatgaaattaaaccgcaattactgacgacgggcggtacgtccgacggacgttttatcgcccgtatgggagcgcaggtggtagaactggggccggtgaacgccaccattcataaaattaatgaatgtgtgaatgccgccgatctccagctactggcccgtatgtatcaacgcattatggaacagctcgtcgcctgatgagcgttccggtaagaggaaataagcatggactggctggcaaaatattggtggattctggtattggtgtttctggtaggcgtactgctgaatgtgatcaaagatctcaaacgcatcgaccataagaaattccttgccaataaacctgagctgcccccgcatcgcgattttaacgataagtgggacgatgaagaagactggccgaagaaagatcagccgaaaaagtaaccggatataatgccggacaggtatcgctatccggcatgctccccaccgccgggcattacgtcgcgtaaacgctgcgttcgtccggcatccaacgcaatcagcgcctgcgccgcctgcgcacgttgcaacgccagcagagctttacggcctgaaatgcgtagccgggcgcacagttcggcatcgctggctttttcctccagccgccctctcagcgccggtaatggcaatgcgctgtattgcagtaaacgatgcaggcaacctaacgatgtcagtagcggacggtgcgcgaacgcaaaaccgaccagctcacgccagtcttcatcattaagcgcctgttcatctaacgccgccagcggtatcgcctcgccgttccactgcgtcaggatatccgcatcgcggcgcaaacgttggtgttcctgctgcgccagccgttttcccgcgtcgctcagcggcaataacgccatcgccgtatagcaaccgctgctcgcctcccgatggttgcccatccgtaccagtacaaagccgcagcgttgccagaaacgccacagctccggcgtatagccgaagctgacggaaagataatcacactgcgccgcctgcatgcacgcgcaggcaatcaactgctgaccgatgccttcacgctggcgagcggggtgcactgcgatacggcttacgcgacgcccaaccagcgtcgcggctaaagggtcgctaccgtgcgccgccagcgactgcgccaccagattcccacgcggccgccggaaaccgcaccatacagcctgactgagttctgcggataacccgccctcttcgaccagccagagggcgcccgccacacggttattcgccgtagcctgcaagaaatgctgtcctggcgcatccatcattcggcgcagatccagcggcgaagtacgatagtgcgcccccgacagtaactgatacacagccctcggcaacgcgggcgtattcacccaggcctgttggtaaaacgccgagattgctatcgcgccatgtggcgcctgcgcaaacgcttcatcgtcgaatatcagcgcctcgctgacgatattttccagcgggcattctggcgcccagcggacaggctgacgaagcgtgaagcggtgaagctgcggaaaacgggcgcaaaacttaagtaaaaaaccgcgtccggtgccttcgtagccctgaacggtggtggtgagtagtatgcggggaaagcgcgaaaccagttgcagcagcagcggcgcggggattgccgccgcctcgtcaactaccagccagtcggctcttgccccgctcgccagcaacgcatccggcgccataaagcagaaccgctcaccggcaaacgctgccaggatatccgttgccgttttcgccggtgcggtcacgatagccgtgcccgccatccgggagatgaattgcccggccagcgccgatttgccgcgcccacggggggcaatcaccgtcgccacgccgggcggcatttcacgtaaacgcgataagatagccgcctgctccggctgcggctcgccggtggcgggtcgccagcgtccacggaaaggataagatggccagcaaaacggctggtgctgtcgccaaagcagcgtttgcggatcgcgggagagagtccgtttaagatgctgtgcaaactgcggtgtggggataggctgcgcgcagtcgctccagcgcagtgaatcggtatcaggccggctttcccacgtctcgtacggcggcatcagcagaagcagccagcttccggcctgcaaggtcccgctcagggcggcaaacgctgcggcgtcaaagccctgccaggcatcaaatatcgcatgacggaattcacggcccagcagcgtttgtaacgcctgtggcgtacagcacggctgggcgggcgcgtcaggcgcgacccacagccagtcaccgggcaatgcagcgcgtatcgcctcggcccgctcccggcaccacgccgcatcgccgctgatgaccagtaaacggcgaatgccttcctgtgtcatttgcgacgttaacgcctgtagcgcatcgatatcagacatccctgccccggtttatcaaaagtttttgccaaacgtattacattgcgccgggtcaccgctgtcaaatccacgcttaaaccagctgtagcgctgttctgaggtgccgtgggtaaaactatccggcacgacgcgcccctgcccctgttgctgtaagcgatcgtcgccgatagcctgtgcggcattgagcgcctcttccagatcgcccgcctccagtacaccttgctgctgcatactgtgtccccacacgccggcaaagcaatccgcctgtagctccatgcgcaccgaaaggcgattcacctccgtttgcgacgcgttttgctgtaactggcgtactttaggctcaatacctaacagtttttgtacgtggtggccgacttcgtgggcgatgacataaccctgagcaaaatcaccgtccgcgcccagcttatttttcatatcatcgtaaaatgagagatcgatatagacggtgccgtccgccgggcagtaaaacggccccatcacggactgacccgcaccacagccggtgcgcgtcataccacggtacatcaccagttttggctgctgatagccgcgccccattttttgaaagagttgcccccaggtatcttcggtcgtcgccagaatcaccgaggtaaattttgccgcttcatcatcattggggcttatcgaacgcgtcgactgctgctgcgaaaccggctgaccggtcaacagaccggttaaatccaccccatagtaccctgcgaccaacaccaccaccaacagaatgatgccgccttttccgcgcggaagacgaaagccaggaccacccagcgaggggccgcctggccgattacgtctgtcctctacattgttactttcacgacgcccttgccagcgcataatcacctcattctctctttgttatacagatgatcgtaggcggtcaggcgcaggattaccacaggtaaacgctatcagaatgaggaaaggatgataccggagagcggttgccccccggtcagaagcggaattaatctaatttcacgcccaggcgatgcgcgacggcttcataggcttcaatcagaccgcccagactctggcggaagcggtctttgtccattttgtccagcgtctctttatcccacaggcggctgccgtccggcgaaaactcatcgcccagcaccacttcgcctttatacaggccaaactccagtttgaaatccaccaggataagacccgcgtcatcaaacagttttttcagtacgtcgttggctttgtaggttagctctttcatacgcgccagattttcctgacttacccaaccgaacgtttcacagtaggaactattcaccatcgggtcgtgcagcgcgtcgtttttcaggaacagatcgaagatcggcgggttaagctccatgccttcttccacgcccagacgcttgaccagcgaccctgccgcacggttgcgcaccacacattcaaccggcaccatctccagcttcttcaccagacactcggtatcagacagcaaacgttccatctgggtcgggatgcccgcctcggccagtttggtcataatgaaatggttgaatttgttatttaccatgcccttgcgatcaaactgttcaatgcgcgcgccatcccctgctgacgtatcattgcggaattcgagcaccaacaggtccgggttttccgtgctgtatacggttttcgctttaccacgatacaactcagcttgcttttgcatctttaacactcctgggtgtgaattaacgataagtattcatttcctgctacgcctgccggagacgtcggcctgtaattgtggtgcgaaatagcggttaaatcgcgtttttgtaccgacgcacacgtttgcgtatcttatcagaaaaaagggccggattactccagccctgttaaattacttgttgaacgctgcctggaagacggcaaccagcgcgtcgttctggctttgcgtcagagtatgccccttaggatcgataaactgcaagctgctgcggttatctaaatcgccgacctgcaatttatagtctccggatgccaggcccgggtcgctagcgcccagatcccgccagtcgctgtcagacaacggtttgtacgttaccgccatgctgccctgagagcgagtgctgtcggtgactttcatgcccactttttccagcgcggccgggaggcgttgccacacgaggttgaacggaccgcgaacgaccagcataggtaaaccggtatcatcagcggcgctctgcacatccatcgttgcggcggaacggttctgcgcggcatttgccgcatccgtagcggtcttatccagaccggcggaaatgacgttcatcatttccgtgctatagcgctgcagcgacgccgcgtcagcgaccggcttgccagcctgttccagattaaccagttttaccgttaccgcctgctgatagccctgcggcttcaccgagatttgataacgtccacgatactgttcgtcttcatccaggcggttccagttcacccaatcggtcgtcagggtctggctggcatcgtcacgtttttcaatcggataatttttcgcctgaatcacgctgacgacttgcggccacagcgtgctgctacgaccattttccaccaatagcgtagcggtatcgccagagaactgggtacgcgcgccgctcactaacgctaacggctgcgctggcggacggatatccaacgccttaccaaccgcgccgctccccttcgtgaccggaataacgtagtcgccggtcattatcggcaggatcattcctgccggggcgtgaagttcagcaagcggcgcggcatccagataggattcatcgccgcttacctggcgcttgtagcgcgaatcggaactacaggcagcgagcagcaaaacaagcgaaacacccgcaaccttcgccaggcgcgacttttgtactgagtaagccatcaaatctccctaaactttacagcaggccagcatgctgaagcgctgctttgacgatgtcacgaccatggtctgtgataggcgtcattggcaggcgcagcgtgtcggtcgccacaagacccaatgccttacatgcccatttcaccgggataggattgggttcgacaaatagtttgttgtgtaacggcatcagacgctggttgatagcgcgcgcctcggcaaattgcccttccgccgccagtttgcacatgtcagccatatcgcgcgccgctacgttagccgtaacggaaatcacgccatgaccacccagttgcataaagtccagcgcagacgcgtcatcaccgctaagcagaataaaatcgtctgaaaccagctctttgatctggtgaacgcgggttaagttccctgtcgcctctttgatagcgataatattttttatttccgccagacgacccacggtttccggcaacatgtcgcaaccggtacgggacggcacattatacagaatttgcggcaagtcagtgtgttccgcgatggctttgaaatgctggaacaaaccttcctgcgtggggcgattgtagtacggcgttaccgtcaggcagccaacaatgccgctatcgttaaaacgctgcgtcaggctaatcgcttccgcggtcgcgtttgcgcccgtgccggcgataaccggaatacgtccgtcagccagttccagcgtcatcatcacgacatcgccatgttcatcatggcttagcgtggcagactcgccggtagtgccaaccgaaacaatcgccgaggtaccgttggcgacatgataatcaatgagttttttcaggcaagacctactgacgttacctttctcatccatcggcgtaacaagcgcgacaatacttcccgtgaacatgggccatcctctgtgcaaacaagtccctcaatggtacgtttggtatggcaataaaagcaagcgaccaaagccgttctgattgttgtatgcaggttttttttatggtttccttaagattacctcaccgctcaaaggaataactggtttgacaccgtcatcacaacactatttggttatcactgcgctgggcgccgacaggcccggtattgtgaataccattactcgccatgtcagcagttgcggctgtaatatcgaagacagccgactggcgatgctgggcgatgaattcacgtttattatgctgttgtccggcacgtggaacgcgattaccttgattgaatcgacattgccgttaaaaggcgcggagctggatctgctgattgtgatgaaacggacgtccgaccgcccccgcccggcaatgcccgcgacggtatgggttcaggttgaggtcgccgactccccgcatttaattgagcgattcaccgcgctgtttaatagtcatgaaatgaatattgcggagctggtctcccgcacgcagccggctgaaggtgataaagctgcgcaattatttattcaaatcaccgcacatagcccggcgtcgcaaaattccgcaaatattgagcaagcctttaaagcactatgtacagaactcaatgcgcaaggcagtataaacgtcgtcaattactcacaacatgatgaacaggatggagttaagtaatgaatccactgaaagccggtgatatcgcaccgaaatttagcttgccggatcaagacggggaacaagtaaatttgaccgacttccagggacagcgcgttctggtttatttctacccaaaagccatgacacccggctgtaccgtgcaggcctgcggcttacgcgataacatggacgagctcaaaaaagcaggcgtggacgtgctgggcatcagcaccgataaacctgaaaaactctcccgtttcgctgaaaaagagctgctgaactttacccttttgtccgatgaaaaccatcaggtgtgtgaacagttcggcgtctggggcgaaaagtcgtttatgggcaaaacgtatgacggcattcaccgcatcagctttttgattgacgctgatggtaagattgaacacgtctttaatgattttaaaaccagcaatcaccatgatgtggtgctgaactggctgaaagaaaacgcgtaaaagcctcaggccgcgctgatgtgcggcctggaaagggaatgcgccgtcaggcttgccgcgccagacgccatatcgccgccacattgcgcgccgacaggctcaggttatattccgcctcgtgtaaggcttccggcagcgtaacgatatgcgacaaaatcgacagcgctgcatcgataccctgttgatacacaacgtgatgatcgtgttgcagcccaccggcgagcgcgataaccggtttatgataccgcttcgccactctggcgacgccaatcggcgtcttgccgcaaatactttggctgtccagccgcccttctccggtaatcaccagatcggcatctttaaccgcctgctcaagctgtagcgtttccacgacaatctctacgccggcgcgtaattccgcattgagcaatcctaaaagcgcggcgcccattccacctgccgcgcccgcgccgggagcattaatcacctcacgccccgtagcctgataaatatgtcggccccagttttccagcgccgcgtccagggtgttcaccatttccgctgtcgcccctttttgtgggccaaaaatggccgatgcgccctggggaccacacagaggattgttgacatcgcacgccacggttatcgataccttacgcagcaatgggtgacaaccggacagatcgatagaggccagcgccgccagcgcctcgccgcccggagaaagcgagcgcccctgtttatcgcgcaatataacgccaagcgcctgcatcatccccgcgccgccgtcattcgtcgcgctgccgccaattcccagaataatacgctttacgccacgctccagcgccgcgacgattaactcgccggtgccgtagctggtggtattaagcgggttgcgcaattcaggcgaaacgtgatgcagcccggatgccgccgccatttcaatcacggcggtatcgctatcgcccagcattccccagcgcgcggccaccggttgccctagcgggccttgtacccactggtcaatataacgcccgccgctggcctccaccattgattgtacggttccttccccgccatccgccatgggcactttaacgtagtcggcgtcaggataaatttcgcggaaccccttttctatcgcctcagcgaccgccattgcggacaaactttctttaaatgaatcaggagcaataacaattttcatagggattatcctgcaaaaccaaagaaaccgaacatcagagtagaaataaaggtaatggctaaccccaccagcgtttcatacggcattagctttaaacgttcatgaatttgcatattgacgctgccgcccgtcgcgtggaaaaagctgccgtgcggcagatggtccagcaccgtggcgcccgcatggatcatagcggctcccgccagggcggaaacgccaagttcaagtaacgtgggagagaaaacgccagacgccaccgccgttcccgccgtggttgaggccgtcgccattgacatcatggcgccagacacgggcgccagcagccaggatggcaatcccgaagcggtgaggccatgaatcaggacatctttaagttcggaattagcgataatgccggccagcgtaccggttcccagcaacataatagcgacaggcgccatacgcatcagaccagcgaccatgtactggttacagtggcgcgcgcgtcccatcaacagcagaccgaccaatccccctacgggcagggcaattaacgggtcaatggaaatgccggcaaacggacggagagaaagcaggaaaatagcgaccagcggcgcgctaatcgccaccagaaaaccgggtctggcgacggagtcatcatggtgagtcacttcatgatcggcgacgcccgcgcctttattattcagccgtttcgctaacagataggcgataataagcccaacgatgtccggaaccacgcccgccagcataatagaggtaagaggaacatgaaacgcatcggaggcggcaatagcgttcgggttgggtgacatcacgttacccgctttgccgccgccgaccatcgccagcagaatagcgctttttgacaggcctgcattacgcgcaatcgacagcgcaatcggcgcgacggtaatcaccgccacatcaataaatacgccgacggcggtcagacatagtgtggcaatggctaatgccaataacgcccgggtttcccccactttgcggacaatcgtctcagcaatcgtattcgccgccccggactcaattaatacgcccgccagtacgcctgcggccagaatacgcaatacggcattaacgatgccctgcgcgcctgacaccatcagcgacacggtttgcagaagatcggcgccgccaatcaaaccgccgaccagcgcgcccgccatcatgccgtaggctggcgacacttttcttaaaattaatacgatggccacaaccaatgcggcaatggctcccagggtggatatcgacgtcatatactgcgcctcctttaacatggagcgcgcagtatggaaaaaaccgcctaaaaatccgctggagctttcaacaaatttcgattcgaccaggcagcggtaacttgtcggacggtacagattcggcctgaagctccataccgatataaagccaaagcgtactttttaactcgttgatttttatgtgcgtaatatcctcacagcgctgtaagcgatagcgcaatgtattcacatgaatatgcaatgctttggccgtttgcgtcaggtcacaattatgttcaaaccaagtccgcagcgtctgttgcaatacgcctttcgcgtcatgttgcgccagttgcagccacagacgcgataactcctgcacttgccaactttcagacagcccgcttagcagcgcgggaagcgcgtggtcatgataaaaaatgtactggctgcgcagcttttgtcttttcgccatcgcctgcgtggctctcgctgtgagcaaagatcggtgcaatcccgtctcgccggcaaaatagcccccaaccaaaatacggctaaagcccgatgatgcagcccatgatttaaaaatctgcaattcgcccatttcctggcgggtattccactttccctcttttaacgtgataggcttaataatgattaattcattaaattcggtaaacgtcaccaaatggttacgcgcgtgattctcgaaataatccattacattgcgcagcgcttcgcgatccggctgggaaagttcaataatcagcaccactctgggaaccgccagatcaatacccagataggccgccatggagcgcaacgactctgttgaattttctcgcaaaatcaattggttgatcagctcttcgcgatagcgtttatcccattgtcgctgttcgatcagcaccatatgctcgatcaccagctccgccgccattttaaccagctcggcatacgcgcgaacctcctccggctcgccggtaatgccgaccacgccgataagctgttcatgaaaagagatgggaagattaatgccggatcgcacgcctttaagctgattggcggtagcggaatcaatttctacaaaacgattttccttcagcgccagaatggccccttcgtgacgctggcgaagccgcgaaggttcgccagacgcgataatgacgccatgctcatccatgacgtttaccgagtaaggaataattttcatggctcgctgtacaatttgccgcgcggtataccctttcaagtaatgttttctcaacacactcattccctgtttcgttatcgcttcacattaaaaaaacaatctcgcatcaatgatgtcacttattaacgaatttctcagaagaatgcttaggctaagtcaccaaattttggcggctttacagcgagaattttgtaggttccgacaataaaaatgccgcaacacggtgcggcattaaaaaaaagagcggctttctaagcgcttgtccctcatcaggcgtgcgcaaaatggcggcagggcatatgatgtcgttcacgctttacaacttttgtactgaccgctcaggatgaggcatccgtcacctgaccatccggccaggcatggacaacggctttaatcagcgtcgccaatggaatggcgaaaaacaccccccagaatccccacagaccgccgaaaatcaccactgacagaataatcaccagcggatgcaaattcaccgcttcggagaaaagtaccggtaccagcaaattgccatccagcgcctgaataatcagataaacggcaaaacagctccagaattccgtccccaggccaaactgaaacagcgcgacgcccaccaccggaattgtcaccacaaaggcgccgatataggggatcaggaccgaaaagcccaccagtaccgccaacagtagcgaatagttgaggccaaacagcaaaaagcccagccaggtcgccacgcccaccactaccatctccagcacttttccgcggatatagttggtgatctgctgattcatctcattccacacctgccccgccagcccgcgattacgcggcagcacgcggcgcacggcattcagcatctgctctttatcttttaccaggaaaaagaccatcagcggcaccagcaccagatataccgccagcgtcagtagcccgactaacgacgccagcgaatacttcaccaccgaatcgcccatgttaagcatccgggtacgcatgttttccgccatagcatcaataatgcccgcatccatcagcgccggatagcgtcgcggcaaggtcgcggcgaaatcggacagtttattcagcataccgggcatatcacgaatcaggtaaataccctgctgccaggcaatcggcatcaccacaaacgccattaataacagaatgccgacaaagaggataaggacaatggaggctgcccagcgccgggaacagccaatcgcctgcaggcgcgccgtcggccactccagcaggtaggccagtacgattgcgaccagcagcggcgctaacaggccgctaaagaaaaagaggatgctaaaaccagccaccagaatgaccagcaaggcaatcgcctccgggtcgctgaagcgacggcgataccattgcattaacatttcgagcataaaacccttcccagaactcaactgcgggattgtgatgccgaattgtatcgaaatgtcacaaaaaagacttcgctttttatcgttgattcaggaaactaaaatagtgagtctgtgctcatcacagttacacttatgaagtgtcggagcgtggaacgatatttcacgacgttggtcaaagggctatctcaaaacaacaggatagaggttatgttcaggcagttgaaaaaaaacctggtggcaaccctcattgcagcattggctctcggtcaggtcgcgcccgcatttgccgaccctgccgacacgctgcccgatatgggaacctcggcaggaagcacgctttctatcggacaagagatgcaaatgggcgacttttatgtgcgccagctacgcggcagcgcgccgttaatcaacgatccgctgctggtgcaatacattaacgcgctgggtatgcgtctggtctcgcacgccgactccgtcaaaacgcccttccattttttcttgatcaataatgacgaaatcaacgccttcgcgttctttggcggcaatgtggtgctgcactcggcgctttttcgctacgcggataacgaaagccagctagcttcagtcatggcgcatgaaatctcccacgtgacgcagcgccacctggcgcgcgcgatggaagatcaaaagcgcagcgcgccgcttacctgggtgggcgcgctgggttccattttgctggccatggccagcccacaggccggtatggcggcgctaaccggtactctggcgggaacgcgccagggaatgataagtttcacccagcaaaatgagcaagaagccgaccgtattggtattcaggtactgcaacgcgccggatttgacccacaggcgatgccctctttcctcgaaaaactgctcgaccaggcgcgttactccacgcgtccgcctgaaattttgctcactcaccccttaccggaaagccgccttgcggatgcccgcaaccgtgccaaccagatgcgcccggtcgtggtgcaatcttccgccgacttttatttcgccaaagcgcgcgccctgggaatgtacaattccggacgtaaccagctcaccagcgacctgctggatcagtggtctaaaggcaacgtgcgtcagcaacatgcggcgcaatatggccgggcgttgcaggcgatggaagcgagcaagtacgatgaagcgcgcaaaacgttgcagccgctgttaagcgcagaaccgaacaatgcctggtatcttgacctcgccaccgatattgacctcgggcagaaaagagccaacgacgcgattaatcgcctgaaaaatgcccgcgatctgcgcgttaatcctgtgctgcagttaaacctcgccaatgcgtacctccagggaggccagccaaaagcggcggaaaccattctgaatcgctacacctttagccataaagatgacggtaacggctgggatctgcttgctcaggccgaagccgcgctgaacaaccgcgatcaggagctggcggcgcgcgctgaaagttatgcgctggcgggacgactggatcaggcaatttcactgctcagtagcgccagcgcccaggcaaaactgggtagccagcaacaggcgcgttacgatgcgcgtatcgaccagctgcgccagttacaggaacgcttcaagccatacacgaaaatgtaatcgccgtttattagccggatggcgtcacaaggagaactcatgaccgacacgattaaaatctaccataacccgcgctgctcgaagagccgcgacacgctgaacctactgaaatctaacggcgtggaaccggaagtggtgctttatctggatacgcccgccgacgccgccaccgtgcgggaactgctgcgtatgttgggcatgtccagcgcgcgcgaactgatgcgccagaaagaagatctctataaaacgcttcacctggcggatagccagctgagtgaagaggcgttaatccaggcgctggttgaacaccctaaactgatggagcgccccattgtggtggcaaatggtcaggcgcgcattggccgaccgcctgagcaggtgctggacatcctcggttaaccgttgaacgccgccgtcgcggcgtattacagtttcagaatctctttgacaaacgggatcgtcagttttcgctgggcagtgatcgacgcatgatcgagctgatccagcgtcataaacagcgtgcgcatttcgcgatcaagacgtttgagtaaaaaccgcccaacatcttccggcagttcaaacccccgtaaccgggcacgcaactgtagcgcctgaagtttgtcttcatcggaaagaggctggagtttatagatttgcccccaatccagacgggaagcgagatcgggcaagcccagatttaactgtcttggcggacgatcgccggtgatcaataaccgcgtcttaccggactccagaatgcggttatagagatcaaagatcgccatctcccacagttcatcgccagcgacacactcaatgttatcaatacacaccagcgagaggtgttccataccgtcgagcacttccggcacgaaccaggtacgtttatcgagcgggacgtagcctaccgcatctccacgctgcgacaattcagcgcaggcggcgtgcagcaaatggctgcggcccgcgccttcacgcgcccaaaggtagatatatccactatgttcctggcgcaacacgttttgtaacgcggccagtagagaggcgttatcccccggccagaaacttgcgaaagtttcgtcgtcaggaagataaagtggcaaagagagctgtgccggtgtgttcagagatacctcaacccaggatgacataaaatcgcgctgagtttaccacataattcccgtgagatagaaccgggcagcatcgctgcccggcaacccgttactgatgcggaggctccgcatcatttgcctccagtaccacttcttccggacgcaacaggctaatcagtttaaaaatcaggctcaggccaatcccgacgatggtcgccagcgccatccctttcaattctgccgcgccgatatgcactttcgcgccgctcacgccgatgatcaaaatcaccgaggtgaggatcaggttttgcgctttgttgtagtcgactttcgattcgatcaagacgcgaatccccgacgcgccgataacgccgtacaacagcagcgagacgccgcccatcacgggtaacgggataatctgaatcgccgccgccagtttgccaacgcaggaaagcagaatggcgaaaatcgccgcgccgccgataacccaggtactgtaaacgcgggtgatcgccatgacgccaatattttccccataggtggtattcggcgtggagccgaagaaaccggaaatgatcgtcgacaatccgttagcgaacatcgagcggtgcaaaccgggatcgcgcactaaatcttttttgacgatattcgccgtcaccaccagatgaccgacatgctcggcaatcacgaccaacgccgcgggcagaatcgtcaggatagcgaaccattcaaaacgcggcgtatagaaggtcggcagcgcaaaccagtgcgcctgggcaatcggcgtggtatcgaccacccccagcgcgaatgacagcgcatagcccgccagcacgccgatcaaaatcggaatgatcgccaggaaaccgcgaaacagtacggagccgaacaccgtcaccgccagcgtgaccatggagataataattgttttcgtgtccggcgactgcccttgcgcagggagcaatccggccatccccgccgcgacgccagccagctccagaccgatgacggcaacgattgcgcccattgccgcaggcgggaacatcacatccagccagccggtgcccgcttttttaacgatgaaagagaccagacagaacaacacgccgcacataataaaaccgcccagcgccacttcataacccagcggcaacaacagtagtaccggggaaataaaggcaaagctcgatccgaggtaggcaggaattttacctttgcagataaagagatacagcaacgttccgataccgttaaacagcagcaccgtcgcgggattgatatgaaacagaactggcaccagcacggtcgcgccaaacatggcgaaaaggtgctgtaaactaagcgggattgtctgtaaaagcggcggtctttcactcaccccgatagcacggcgcgtcatagtgttttcctctaagtgtgtttgttatgagtggttttattcaaaaaaaagccgactcttaaagtcggcttttaattatttattcacttatttggtaccaaaaatcttatcgccggcatcgccaagccccggaataatgtatccgtgctcgttaagcccctgatcgatagaggcggtgtacagttcaacgtccgggtgcgctttttccagcgccgcaatgccttccggcgcggcgaccagcaccagcaccttaatgctgctacagcctgcttttttcagcaggtcgatggtcgcgatgacagaaccgccggtcgccagcatcgggtcgacgatcagcgccatgcgctcatcaatgttcgataccagtttctggaaataaggtactggctcaagcgtctcttcgttacggtacatcccgactacgctgatacgcgcgctcggtacattttccagaacgccttccatcatgcccagacccgcgcgcagaatcggcacaacggtaatttttttacctttgatctggtcgatttccaccgggccattccagccttcgatggtgactttttccgtttccaggtcggctgtcgcttcatacgtcagcaggctgcctacttctgaggcgagttcacgaaagcgtttagtgctaatgtcgttttcacgcatcagacccagcttgtgtttgacgagtgggtgtttgacttccacgatcttcatactcttctcctatcctcagatgactggcaaccacaaaaaaaatcgccggattataccgcttttcctctctgacgcaacacaatgtatgcttgacctggatcaaccaaaagcgctgatagcggaaaagtgagtataaatcactcacgttgaaacaggcgataaaggctaacaaccgtttgaatattagcaattttaagggtgaatgacctgtcccgaccgcctgtcgtaaaccaagtgctggatatccttttcttttttaccaacagggaaattttcaagcagcgaccgaaaccatgcaaaaaaaatcgcccggataatcagggcgcagaccacgctcgcaaacgtttgctttccctgttagaattgcgccgaatttaacttttaccgcaaaaaaaacgtggggaaccaggcagtgaccgataagacctctcttagctataaagatgccggcgtcgatattgatgcgggtaacgctctggttgatcgaatcaaaggcgtagtgaagaaaactcgccgcccggaggttatgggcggtctgggcggtttcggtgcgctgtgcgcgttgccgcaaaaatatcgtgaaccggtactggtttccggcactgacggcgtaggcaccaaacttcgcctggcgatggacttaaagcgccacgacgctatcggtattgatctggtggcaatgtgcgtaaacgatctggtcgttcagggcgcggaaccgctgtttttcctcgattactatgccacgggtaaactggatgtcgataccgccgccagcgtgatcaacggtattgccgaaggctgcctgcaatccggctgcgcgctggtcggcggcgagacggcggaaatgccgggcatgtatcacggcgaagattacgatgtggcgggtttctgcgtcggcgtagtcgaaaaatcagaaatcatcgacggctcccgggttgccgaaggcgacgtgctgattgcgctcggctccagcggcccgcactcgaatggatattcgctggtgcggaaaattattgacgttagcggctgcgacccacaaaccactctgctggaagggaagccgctggccgatcatctgcttgaaccgacccgtatctacgtaaaatcggttctggaactgattgaaaacgtcgatgtgcacgctatcgcccacctcaccggcggcggcttttgggaaaatattccgcgcgttctgccggagaatacccaggcggtaattaatgagtcgtcatggcagtggcccgccatctttacctggctgcaaaccgccggtaatgtcagccgacatgaaatgtaccgtacctttaactgcggcgtcggcatggtgattgcgctctccgctccggaagcggacaaagcgcttgctctgctaaacgagaaaggtgaaaacgcatggaaaatcggtatcatcaaagcctttgattccgaacagcgtgtggttattgaataatgaatattgtggtgctgatttccggcaatggaagcaatttacaggcgattatcgatgcctgcgaagcgaagaaaattaaaggcaccctcagggcagtattcagcaataaggccgacgcgttcggccttgaacgcgccagagaagccggcattccggcgcaagcgctgactgccgatcggtttgacagccgcgacgccttcgatcgcgagttgattcgcaagatagacgcgtatgcgcccgatgtggtcgtgctggccggttttatgcgtattctgagtccgatgtttgtcgcgcattactacgggcgtctgctgaacattcacccttccctgctgccaaaatatccggggttgcatacccatcgccaggcgctggaaaacggcgatgaggagcacggtacctcggtacatttcgtgacagacgaactcgacggcggcccggtcattctccaggcgaaggtgccggtttttgccggcgacagcgaagatgatatcaccgcacgcgtacagactcaggaacatgcgatttatccgctggtgattagctggtttgcgcaggggcgtctaaagatgcgcgataacgccgcctggctggacgggcgtcgtctgccgccgcaaggttatgcgtctgacgaataatacgtcatcgaacaggactgcgtctgcttgccggatggcggcataaatgcctatccggcctactcttttcccttcctttatgctatcagtttattgtcatatttttctggcgcagttggacattaacgcgtaatgctcgccataatcatcaggcagtgtcccgtgaataaaacggagtataggtagtaatgggtcaggaaaagctatatatcgagaaagaactaagctggttagcatttaacgaacgcgtgttacaggaagcggcggacaaatccaacccgttgattgagcggatgcggttcctgggaatctattctaataacctcgacgagttctacaaagtgcgtttcgctgaactgaaacgacgcattattatcagcgaagaacagggttcaaattctcattcacgccatttgttaggcaaaattcagtcccgcgtgttgaaagcagaccaggagttcgacggcctgtacaacgaattactgctggaaatggcgcgtaatcaaatctttctgatcaacgagcgtcagctctcggtgaaccaacaaagctggttgcgccactattttaagcactatttgcgccagcatattaccccgattcttattaaccgggagacggatcttgttcagtttttaaaagatgattacacctatctggcggtggagattatccgcggcgacaccatcaactatgcgctgctggagataccgtccgacaaagtcccacgcttcgttaatctgccgccggagacaccgcgcagacgcaagccgatgatcctgctggataatattctgcgctactgcctggatgacatttttaaagggttcttcgactatgacgcgcttaatgcctattcgatgaaaatgacccgcgatgccgaatatgacctggtgcatgagatggaatccagtctgatggagctgatgtcttccagcctgaagcagcgcctgaccgctgagcctgtgcgctttgtctatcaacgcgatatgcccgccgcgctggtcgacgtactgcgggaaaaactgacgatctcccggtatgactcaatcgtacccggcgggcgctaccacaattttaaagactttattaattttccgaatgtcggtaaagccaacctggtcaataaaccgttaccgcggttacgccatctttggtttgataaagagaagtttcgtaacggtttcgacgcgattcgtgaacgtgatgtgctgctctattatccttatcacacctttgaacatgtgctggaactgctgcgtcaggcgtcgtttgacccaagcgtgctggcgatcaaaatcaatatttatcgcgtagcgaaagactcgcgcattattgactcgatgatccatgccgcccataacggcaaaaaagttaccgtggtggtggagttgcaggcgcgcttcgatgaagaggcgaatattcactgggccaagcggttaaccgaagcgggcgtccatgttattttctctgcgcccgggctgaaaattcacgccaaactctttctcatctcacgaaaagagggtgatgacgtggtgcgttatgcgcatatcggcaccggtaacttcaacgaaaaaacagcgcggctgtataccgattattcgctgctgaccgccgatgcgcgcattaccaatgaagtgcgtcgggtctttaattttattgaaaacccctatcgcccggtcactttcgattatttgatggtttctccacaaaactcacggcgtctgctgtatgagatgatcgatcgtgaaatcgccaatgcccagcaaggcttaccgtcagggattaccttaaagcttaacaacctggttgataaagggttggtcgacaggctatacgccgcgtcgggttcgggcgtccaggtcaatctgctggtacgcggtatgtgttctcttattccgcaactggaaggcattagcgataatattcgcgcgattagcatcgtggatcgctatctggaacacgatcgagtttatattttcgaaaacggcggtgataagcaagtttggctctcttcagctgactggatgacgcgtaatattgactaccgtatcgaagtcgctacgcctatcctcgacccgcggcttaaacagcgcgtcctggatatcattgacattctgtttagcgacacggtaaaagcgcgttttatcgataaagaactcagcaaccgctacgtaccgcgcggcaatcgccgtaaagtccaggcgcagctggcaatttatgactacatcaaatcactcgagcaaccagactaacgctatgccaatttacgataaatcccctcgtccgcaggagttcgctgcggtcgatctcggctcaaacagctttcatatggtcattgcccgcgtggttgacggcgcaatgcagattatcgggcgtttaaaacagcgcgtccatctggcggacgggctgggcgcagataataaactcagcgaagaagccatggaacgggggcttagctgtctgtcgctgtttgctgaacgcttacaaggtttctccccttccagcgtctgtatcgtaggcacccatacgttacgtcaggcgcaaaatgccgctgattttctcaaacgcgcggaaaaggttattccctacccgatagagattatttccggtaacgaagaagcgcgcctgatttttatgggcgtagaacatacgcagccggaaaaaggccgcaagctggtgatcgatatcggcggcgggtcaacagagctggtcattggcgaaaacttcgaacccaggctggttgaaagccgtcgtatgggctgcgtgagcttcgcgcagctctactttcccggcggcgttatcaataaagaaaacttccagcgcgcccgaatggcggcggcgcaaaaactggaaaccttaacctggcagtatcgtattcagggttggaacgtagcgatgggcgcttccggtacgattaaggccgctcatgaagttctcctggcgctgggtgagaaagatggcttcattacgccggatcgcctcgataaactgaagtcagaagtgttgaagcaccgctcctttaatgcgctcagcctgccgggtctgtctgaagaacgaaaagcggtctttgtgccgggcctggcgattctgtgcggcgtttttgatgctctggctatccgcgagcttcgcctttccgacggcgcgttgcgcgaaggcgtgctgtatgaaatggaaggccgcttccgccatcaggatgttcgcagccgtaccgcaaaaagtctggccaatcaatacaacattgacagagaacaggccagacgcgtgctggaaaccaccatgcagatgtacgagcagtggcaggcccagcagccaaaactggcgcatccgcagcttgaagcgttgctccgctgggcggcaatgctgcatgaggttggactgaatattaatcacagcggtttacatcgccattcggcttatattctgcaacacagcgatttgcccggctttaatcaggagcagcaaatgatgatggcgacgctggtgcgttaccatcgtaaagccataaaactggatgatatgccccgctttacgctgtttaagaaaaaacagtatctgccgttaattcagctacttcggctgggcgtattactgaacaaccagcggcaggcgaccactacgccgccgacgctgcgactaacgaccgatgacagccactggacgttatgttttccgcatgactggttcagccagaatgcgctggtactgcttgatctggaaaaagaacagcagtactgggaagctgtaactggctggcgtctcaatattgaggaagaaagctcgccggagatcgccgcgtaaattgtgagccagacgccgcgccgcggcgtctgcctttactgaatctcagataatagctgcggctcgccaattaaatatccctgaagatagtcgatccccaacgagagcacgacgcttcgtatttcttcgctctcgacatactccgcgacgacctgcatatttttcattcgcgctaaatgacaaatagaagccacaatctgataatcgagactgtttgacactatattgcgaataaaactgccatcaattttaagaatatcggcgtcaacgtttttcagccgcgcatagctggcgtagccagtaccgaaatcatcaatcgctatctgacagccaaactgctgtagctgtcccagcgtcaactgcgcctgctcagcattggtgagagagttgctttccgttacctcaaaaaccagttgccagggttcaacctgatattgcgtaagcaactgcttaacttctgcagggaaacgagcgcggcataccgatgttggcgacagattaatggcaaaacgatgcgcgggcatatattcccggctggccgccataaaccgcagcgtgttttcaatcacccagagatcgatagcggaagacaaaccaaactcatgcgccacgggtaaaaaattgtccgggttgataacgtcgccgttgtcatccctgagtcgcagtaaaatttcatggtaaacgtccccacgaacaccgaaaataggctgcgccatcaggaaaaaatgatcgtgctccaacgcctgttgcaggcgattcatcatcgcaattctgcccttcaaatcgcgctgcaggtgcattgcgccgcgccgctgtaaatcctccggcgcgttagtcgtcaacgaaagatcggaactggtgcttaattcgcccagcagaagataaaggtggctaaccggagaacgcacgcagcagtagctcacgccgacaggcggctgtagcggcagtccatcccagataaaccgaaactgcttaatatgtttatccagcgcttcaatacgctgctgatgcgcctctgtattaagacgcagcaccaggtcgtgccctgacatctggtagacgcactcatttgaggccagcatcggcgtaatccagtgagagagcttttgcttatactggatgcgtagcatgacgccataatttttacccaatagctccaggcccggcacgtgtaaaaaacagatcgtagaccagggcgcattttggagcgcgcggtttaacgcacgtaaattgggaagatgtacaaccgggtcaagataggccagccgccgtgcgcgaccactcactacgcgctgacgcgtggccagtacagacatataattaacaataaaagaaaaaaccagatagctcgaagaggtaatcgctaattgcgtatcataacctgaataccagggcatataacgctgataataatgaatcgacgtaattagcacgacggcccagataattgaaataaacttatagccatagcgcatcgcaccccacagcatgaccggcaataataacgaaagcgtatagttggtactaaatattgaactattatcagtcaatggcatacacagtataaacattagtgtagtcaatacggccagccaaataacgatctcttttttagtggccttgctatcaatctgtagctttaattgctgataatacccccgcaggtgcagcggattacggagagtacgaataataaaatagcacaatggcacgccgacaaggttaccgaccagtaacgcctggtaattaatcagcgtgttgatattaaagggcattacccccatcaggctggctttactttcgtacatgccaacaaaagcggcaaactggtagatgaccagaaataatgttgctgaacaaaatacctgccagaatattcgttgaaacagcaggtgggcgtcgccgtgggaaacattgtttcgccggggggaaaagacacgatagccgccccagcttagcacgatagtaatgataaagtgcatcgtcacagaaagggtttcatacagccctgtctgcgggtatctgcgccagaagatagcaagcacaatgcccggcagtgctgcccagccgaaaaagagcatcaggctaagcataaaagctaacggcaggtaaaaaagaaccacatttccagtgctggtaagcgcataagtatttgcgctacttaaaacaggcagtaaaatcgaagggagaatgagcggtagtccccaccatttatctctgatatttatataagttttatttagtttcatagatgctcagcagaaccccccaatcccaaaggggcgttaacagacaggcatcccacctgactttaaattgatgatgcgatatacatcacacgatagtcatcgattgtaattattaaacaaaagtaacatttgatttaagtcaattattacctttctcctgcagcctttattcgcctttttattctttgttatcattaatttattattaatgtaaatactaaaattatcttccataacaatataagataaatcaactgacgcaattttacattaagaggaattgaccatcggttcgcagtatgccttaatgtagagtgaacgcaggcttgttacgttcttcgccttgataatacccttgaagaacccagcctgatcccgcccatatcgctgggccaacgttaaggaaccctttgtgagtcaggccaacagtatgcgaaaacgacatcgatttaacactcgcatgacccgtatcgtactgcttatcagttttctcttcttctttggacgtttcgtctactcttctatcggcgcctggcagcaccatcaggataaaaaagaagcgcaacagtcatcgctttctgtcaccacgccgggacaacgttaagctgttatccgttaaaaagcccgcgcaagaaaaagaagctttagcgttaacgcaaaaagacaacccactcaatgggttcaggccatgatcagacgcttaaagagcaaccgcgggatatcctgcctgggtgataagatcacatgcgcggttactaagattccctcgaccgaatacaaaacccgatagccttcagcgtggttaaactcccggtagctggcacaagttcagggcaaatctggaatcccagcgggcactgacgtacggtactctcaaactgtgtgagtatctctgcgataaccggatgcggctcaacctcaacgcacttcaggaaacccgctattgtgtcgatgcagtgctttaccgtaaacgtatactcaaaggtcacctgcggctccgacctatccgccagagtcaatgcgaaatcaggaagataaccatcgtgggaggagaataaggtgaccagtcctatacgtcagaatttgttttgtaaagagccacctgggatcagattaccaacgttgacaggcaaaaccatcaactcattacagctaagctcaacgaataatttaggtcgtttcgttggtcgtaatgtaccctggctcggttgggttatgacattcactacgatttatgatatccagcgtgaattaaaaatacatttaatcgtgtggcggttcctaaagatcgcattcagtggacgtacttctaatgagagatattgagaaagaaattatcgattttatcgatcaggaatataacactaaaaagtactttctctgtgggccaaagcgaaccatcacgcttgatatcagtattagggatgatctaaaactcgtttttgaagatagtgaagaacttctacaagagtacttcaagcgttggaatgtagattcagaaggatttgacatactcaactatctgaatccagagtactttggaagtaaagagcctgatccgcgtaagccactaacagttggtatgctcgttgaaagtgctaaaactggacgttggttatatagttgaagaataaagttattatattttaaataccccttatttgggctgaatcgccacggataacctggacacttctgagtcgttggtagatctttttctttatccgctcacgcttcagtagctggaaaaagctttctgcaaccgcattatgacagttgccacgacggctcatactgccctccagtccgtgcgatttcagccattcatagcgggtgtactgactaccctgatcagactgaaccagcacctgtttttggggatgacgtcgccacacggccatcagaagcgcattcaggacaatgtcttttgtcattcgtggttgcattgaccaaccgataactttgcgcgagaacaaatcaacgaccacggcaagatacagccaaccttcgtgggttcatgattacgtcaaatttgccgccagaagctgtgcactacacagaaaactcatctatgcacataaataaaaaccctctgcaaaaacagagggttaaattcacttttacctgttcatgaaaacacaggaaggattatcggcttattcccactcaatggtagctggtggtttaccgctgatgtcatacaccacacgggaaatcccgttgacttcattgatgatgcggttggaaacacgacccaggaaatcatacggcagatgtgcccagtgtgcggtcataaagtcgatggtttcgacagcacgcagagagacaacccaatcgtacttacgaccatcgcccatcacgcctacggaacggaccggcaggaagacggtaaacgcctgactgactttgtcgtacagatccgctttgcgcagctcttcaatgaagatagcgtccgcgcgacgcagcaggtcgcagtactctttcttcacttcgcccagtacgcgcacgccgaggcccggccccgggaacggatggcgatacagcatgtcgtacggcaggcccagctccagaccaatcttacgcacttcgtctttgaacagctctttcagcggttcaaccagccccatcttcatctctttcggcaggccgccgacattgtggtgagatttgatgacgtgcgctttaccggttgcagacgccgcagattcgataacgtcagggtagatggtgccctgcgccagccatttcacgtcttccagtttcagcgcttcttcgtcgaacacttcaacgaaaacgcggccgatgatcttacgcttggcttccggatcgttctcaccagccagcgcggacaggaagcgatcttctgccggtacgtgaacaatgttcagaccaaaatggtcgccaaacatgtccatcacctgctcggcttcgttcaggcgcaacaggccgttgtcgacgaaaacacaggtcagatttttaccgatcgcgcggtgcagcagcatggcggtgacggaagaatccacgccgccggagagaccgaggatcactttatcgtcgcctacctgctcgcgaatgcgcgccacggcgtcatcgatgatcttcgccggcgtccacaacgcttcacactggcagatatcgcgtacaaaacgctccagcatgcgcataccctggcgggtgtgagtcacttccgggtggaactgtacgccgtagaagcgtttttcttcgttggccataatggcgaacgggcagctctcggtgctggcgacggtcacgaagtcggacggaatcgccgtcactttatcgccgtggctcatccacacgtccagcagcggtttgccgtctgcggtcagggaatcttcaataccgcgaaccagcgcgctgtcggtcaacacttcgacctgcgcataaccaaattcacgctcattagaaccttctacatgaccgccaagctgcatcgccatggtctgcataccatagcaaacgccaaataccggcacgcctgcttcaaagacatactgcggcgcgcgcgggctgttttcttcggtggtgctttccgggccgccggaaagaataatgccgcttgggttgaagtcacgaatttgtgcttctgtcacatcccacgcccacagttcacagtaaacacccagctcacgcacgcggcgcgcaaccagttgagtgtactgagaaccgaagtccagaatgaggatgcgatgcttatgaatgttttccgtcattgacgcttattccgaggcaagtgaaacagattaaataaatcgcccgacgcgaaggtcgggcgaagaaaatcaggagcccagacggtagttcggggactctttggtgatggtcacgtcgtgaacgtggctttcctggatacccgcaccgctgatacgcacaaactccgctttagtacgcagttcgtcgatggtagcacaaccggtcagccccatacaggagcgcaggccgcccatctgctggtgaatgatctctttcaggcgacctttataggctacgcggccttcgataccttccggcaccagtttgtcggcggcgttgtcgctctggaagtaacggtcggaggaacctttggacatcgcgcccagagaacccataccgcgataagatttgtaagaacggccctggtagagttcgatttcgcccggggattcttcggtaccggccagcatagaacccaccattaccgcgctcgcgcctgcggcgatggctttggcgatgtcgccggagaaacggataccgccgtcagcgataaccggaatcccggtgccttccagcgcttccaccgcgtcagaaacagcggtgatctgcggaacgcccacaccagtcacgatacgagtcgtacagatggaacccgggccgatacccactttcaccgcgctgcaaccggcttccgccagtgcgcgagcgcctgcgcccgtcgcaacgttgccgccgatgatttgcaggtcaggatatttagcacgcgtctcacggatacgttgcaacacgccttcagagtgaccgtgagaggagtcgatcagcagtacgtcaacgcctgccgccaccagcgcgtcaacgcgctcttcgttgcccgcgcctgcgccgaccgccgcgccgacacgtaaacggccctgctcatctttacaggagtttggtttacgttccgctttctggaaatcttttacggtaatcatgccaagcagatggaagttatcatcaacgaccagcgctttttctacgcgtttttcgtgcatttttgccagcacgacttcacgggcttcgccttcacgaacggtcaccagacgctctttcggtgtcatgtagacactcaccggctggttcaggtcagtcacaaaacgcacgtcacgaccggtgatgatacccaccagctcgttatcttcagtcaccaccggatagcccgcaaaaccgttacgctcggtcagggctttcacttcatgcaacgtggtggttggcaggacggtctgcgggtcggtcactacgccggactcgtgtttcttcacgcggcgaacttcttccgcctggcgctcaatagacatgtttttgtggataaaaccaatgccgccttcctgggccagggcaattgccaggcgcgcttccgtcacggtgtccatcgccgcagaaagcataggaatattcagacgaatagttttcgtcaactgcgtgctgagatcggcagtattcggcaaaacggtggagtgagcgggaacaaggaggacgtcgtcaaacgtcagagcttctttagcgatacgtagcatgggcaatatctcacctgggaggttaataaatattgccgcggcattatacagaacgtaatcggttgcatctacatttttttgcaaatagtgcttgcgatcccccgtgagcaggttactatcgattgaataacctgctgatttagaatttgatcccgctcacatgttatcctctcaaacttcctcaatttttaccgtaagccgccttaaccagacggttcgtctgctgttagaacaggagatgggacaggtatggatcagcggcgagatttctaatttcacgcagcctgcgtcgggccactggtactttacgctcaaagacgataccgctcaggtgcgctgtgcgatgttccgtaacagcaatcgccgggtgacgttccgcccgcagcacgggcagcaggtgctggtacgcgccaacattacgctgtacgagccgcgcggcgattatcaaatcatcgccgaaagtatgcagcccgcgggcgaaggcttgttgcagcagaaatatgagcagctaaaagccaaactgcaggccgaaggcttgttcgatcagcagcataaacagccgttgccctccccggcccactgcgttggggtgatcacttcgaaaaccggcgcggcgctgcacgatattctccacgtgctaaagcgtcgtgacccatccctgcccgttattatctatccaaccgcagtccagggcgacgacgcgccggggcagatcgttcgtgctatcgaactggcgaacgcgcgcggcgaatgtgatgtactgatcgtcggacgcggcggcggttcgctggaagatttgtggagttttaacgacgaacgcgtggcgcgggcgatttttgccagccgcattccggtggtcagcgccgtcggtcacgaaacggacgtcacgatagctgattttgtcgccgacctgcgcgcgcctacgccatcagcagcggcagaaattgtcagccgtaaccagcaggagttgttgcgtcagatccagtccgcccagcagcgtctgggcatggcgatggactactacctcgccaatcgcagccgccgtttcacgcagatttttcaccgtctgcaacagcaacatccgcaactgcgtctggcccgtcagcaaaccgcgctggaacgtctacgccaacggatgggatttgcgcttgaggccaggattaagcaggccaatcaacgccaacagcgcgtaagtcaacgcctgagccagcaaaatccgcagccgcgcattcaccgcgcgcagtcgcgcatccaacagctggaatatcgtctgacggagaatatccgctcacggttaagcgaacagcgcgagcgttttggcaacgcggtcacgcatctggaagcggtcagcccgttagccacgctggcgcgcggctatacggtttcgacgacaacggacggcaaggtgctgaaaaagatcaaacaggtcaaagcaggcgatatcatgaccacgagactggaggacggctggcttgaaagtgaagtcaaatccgtcacgccgggcacgtaatccaacactcccccaccctttgcagcgcgatgttgggtttcgacttcgcctcagccaacctacgcgccacgtcggataaggtgtagccataatctgacgatcaaccggtttgtcattcgcctcaaaaccgggcagggaacacccgcccggttttgtctaacttaccagttatagcgcagattgaggctaccgttcagatcgccaaagtcattgctgccagtctgcccggcaacctgagcgcgaacgctccactgcttatcgatatctgcctgcagacccactttcagctccgcacggttagccggaagatcctgtttcaccgtagcatcatcaaacgataccgacacatcatcgctggtgtgcagccagttagcttcagcaaacggctggataaccgtacggctgcctttgtacagcttgccgtcaacacgcagacccagacgcgttgtccaactgtcgccatcctgaccatcgatccgggtgccgtagttatccttcacgctatccgctgagtaattctgccagacaacctgcgcctgcggcgtcagactgacagtattaccgttgctaagcgcaatatcgtagcgataaccagtttccagcgagacggcgttagcggttgaatcataagattcagatcccgcatcaccgctctctacgctgttgttgtagaaaccatattggtaccagctgtcgacatacgcgccgctatgcgtttgggcatcggcaaaccaggtggcatagacgccaaggttatagccgtctacgttgccgctactggtgaactggctaccgtccgcgccacggttaccggtgctgtcggtatcggcgttgatgtagctcgccatgacgccaacggtaacgctctgctggccgttgccccaggccagaatgtcgccgcctaactggaactgggagtagttgctgtccatatcgatattgccgctgacagcctctgattctgctttacccgctttgaagcgcgcccatacgctgccatcggcattacgatactggctgccctcgcggtcatagagggtctgcatttgcaggttgcgcgccatccactggttgcccatgtacgcgccgatatccgcacggtactgtggtgcgacatcgccgccatcgccgccgtcgtccggaggcgtgacattaccgccatcgtcaccgccatccgaaggcgtgacatcactgtcatcaccaccgctgtcgtcatcatcagactgtgcttttgacgccagataccagtcgttgtcactttcattccagtacagacggtaggtatacagactggcgttaacctcattttttagctcaaacgcatcgctggtcgatacgccgccaacatccaccacttcaataccgttagtggtctgtgctccatcgccgatgccgttgatgtacagatcggtggtgccggaggcatcgccggtaatcaccagcttatcggtcgccgaatcatcgtcgcccaggacggtattcagataaagcgagccgccgttgccggtgtaattgccatcaacataaagcgtattgcccggcgtgctggaggtgctgccgctggcgatcgtccccatgttgatcagatcgccattgagggtgaagatagcgcctgtctcctcgctgtcgccgaagaccagcgtcccttcgttggtcaccttaccgttaacggtcgtaccattgctgccgccgaaggtcgccccggaggcgacgttcaccgcctgctggctgcccatctcgccaatcgagccgtctccggacagccatagcgtgccttcctgtacgttagtatcgccggtgtaggtgttcgcgccgctcagcgtcagtttacccgcgcccagtttggtcagcgatttaccgtcccagtcgccgttgccggttttatcgcccagtacgctggtgacttcaaaactgtcgcctgcgcccagggtaaacgtgccgtgtgctggcgtcgctgacgtggcggtcgcattccagctcagcccttcggtaagcaaatattctgacgcatctgcaggattgattgtcccggttacggtcagatagtccggctggtcggtgaggttcatcgtcaggctggtaaagtcgccgctgatatcgctgtccatatccatcagtttaaaggactggaactccgcgtcggaggcgcgcgcttgcaggctggcgtcgctgacgaccaaatcgccgccaagcgtggcgctgccgccggtgatcagcggttgcactgagtcactattcagctcaacgttcagcgtactgccatcttgctgaattaacgcgctgtcgccgagatccaacgaggtgccgagcgccagttgggtcgtcgcgccgctatgagtggtgatgccgcccaccgcgctgacttcaccgtctacgtccagcaccagcgtggcgttattgtctaccagaccggtgcccagcgccgtcgtactggcggcgaccagcgtaccttcattgatggtggtgccgccgctgtagtcgttgtcgccggagaggatcagagtgcctgcgccttctttggtcagcgatttaccgtcccatctgctacccggatccagcgtgtcatcaacgtctgtcagtgtagccgcaacgttaaagctgccgtcagggtcgctcagggtaaaggtgccgtgggcgtcggtagtggcgttgtctctgtccgcataccaggagagggaggccgtcagatcatagtgggtgttgtctgcttcatcgacttttccgtcgatagtcaggaagtcaacatcttcgcggttcatccctgcaatggtcagatcgtcgaaatcgctcgtaatggcgctgtcgctgtcaatcagcgtataggtgtatgcctcaggcgtccagctgtctgtaacgctgccgatgccggtaacattcagagtgccgcccagcgtgacgctgtcggcggtaatcacggcgtcgtcggtggccgcgccgaggtcaatacttagcgtactgccgtcttcctgggtgagctggcccgcgtcaagggtgctgcccgccgccagcgcggtcgtggcgccggtatgggtggtgatgttcgcaagctcaaatgcgccgttggcatccagcatcagcgtaccgctgttgtcgatattgccgctgcccagcgcgttgacgttggcggcaatcagcgtgccgtcggcgatggtggtatcgccggagtaactgttatcgccgcttaacgtcagctcgcccgtaccggttttcaccagcgaaccgctgccggaaagcgtattttccagctcgccctcgccgacctgaagcacaccgctgttggcaacagctccggtacccagcgaatccgcatggtcagccgtcagcgtaccgccgataatggtggtgccgccggagtaactgttatcgccgcttaacgtcagttcgcccgtaccggttttgaccagcgaaccgctgccggaaagcgtattttccagctcgccctcgccgacctgaagcacaccgctgttggcaacagctccggtacccagcaaatccgcatggtcagccgtcagcgtaccgccgataatggtggtgccgccggagtaactgttatcgccgcttaacgtcagttcgcccgtaccggttttgaccagcgaaccgctgccggaaagcgtattttccagctcgccctcgccgacctgaagcacgccgctgttggcaacagctccggtacccagcgaatccgcatggtcagccgtcagcgtaccgccgataatggtggtgccgccggagtaatcgttgccgccgcttaacgtcagctcgccggtaccggttttcaccagcgaaccgctgccggaaagcgtattttccagatcgccttcgcccaccttaagcacgccgctgttatcgatatcgccgctgcccagcgaatccgcatggtcagccgtcagcgtaccgccggtaatggtggtgccgccggagtaagtgttgtcgccgcttagcgtcagctcgcctgtgccggttttcaccagcgagccgctgccggaaagcgtattttccagctcgccttcgccgacctgaagcacgccgctgttagcaacagccccggtacccagcgaatccgcatggtcagccgtcagcgtaccgccggaaatagtggtgccgccgctgtaagtgttatcgccggtcacgatcagctcatcgctaccgcttttgacaatttggccctcgccggtcacgttgttatccagcgtgccctggctcagcgcaagcgttgcgctttctgcaatcgtcacatcgccagtgccgagcgcggcggcgtctttggcggccagaatgccgccgtcaatttcagtatcgccgtagtcgttgccggtgttgctgaggatcagcgtgccgtcgccttgtttggttagcttgctgccgttccagttggaggtcgccgtggtttcgtccagttcgctggtgacggtaaaggtactgcctgcatcaacggtaaaagtgccatgcgcagcgcgcgcagaatttgcgcccgcgtaccaactcaagcccgtagacaactcgtagttggtattatcattcgcatcaacgcccgcgttgatcgtcagataatccggcatagcggaggtgtcagcatccagtgttacgctgtcaaaatcggtagtgattgcgctttgtgaatcaatcagcgtgatcgatccaaagtgttcgtcggtttcgggcgcgacaaaggtggccgttgagctaaggttcagcgtcccgtccagcgtgacgttggcggctttgataattggcgcgctgttggcggtatccagcgtcgcgtttatctggctgttatcctgtaaggtcagggtattgtccaccgtcagcagcgtacctgtcgaaccgctcgcgttgcccagcgtaatatcgccgtcgttggtcagattgccgacggttgacgggtcggtcatgttccactggctggtgtcgtcgagcgacagcgtagtaaacatcgcatctacactaccggttaacgtggccccctggcttaaagagagcgatgacgatgacatgtcactctgagcaacgtcaccgatcaatgtcgtattgttggcctgaatgaccgccttgctgccaagcttgatcacttccggcgcttcaaatgtgctgtcggtcagcacgataggagcgttaatcgtcgtgccagtgtccacatgcagcgcaatcgtgtctgaattaacctgtgctttgttgaccgtcagcgcgttgagatcttcatacccgtcgagttttcttttgctggttataaagataccgtcgccgtcggcgttgatggtggcgccgtcgatcctggcgtccgacgccagaatatacacgcccgtaccggcagaggtaatgttgccgcctgtaatatccagggtagtggcgttattggcctgtaccgccgcgccgctggcattggtatgtgttatggtcgcgttggtgagattaagagcggccttattggtaccctggatggtgctcatcgtacctgcagagctgaccgagctatcagacaggttcagggtggaaccctcgtctgtcgcggtgtttccggcaacaacgtttatctggccttgcgccagggtgattgtgctaccgtccagcacgttcagcgtactgccttgttgcacctgcgcgctgctgctgttagctgcctcaacgatggtaccgtccagcgttgcttctgaacccgtatacaacgtcattacgccgaaattgccgtcaatcgttagcgtactgtctgttaacgtcagtgtgctgccatccgctgcggaaataccctgggtataaatgcccgtagtggttatcttcgcgtcggtaagctcaaggatagcgtaatgatccagcgaaattgcgttggaaacatacttaccgccatccggatcatcagctccgcctccgcttgtttcaatgacgagccccgtccctgtgaccgtggtgggctgccagccgacggtggcgacacccgagacatatagcgccgcgccttcatcggtgcccgaatagctcatcggcggcgttgacgcatccagaacgtgggtctgcgcatcagcatatgatacctgattgtcggccatggccagcgggctgaaaaatccgagcgctgcagccacggcgcaagccagcgccgcgcgcgttgcttttattatttgtccatattcggacttttggtttggagaatggatttcactcgcgcatacttgcgctttaactttgctgtggcctcgcgccagttctgaagccacgacatacatatttcgcacggcgctccagacaatactgtaagtcctgttcaatttttaaatttccctttaataacgttcacgaagcaaactggattttgattgggctgcaaatagcctttaaatgctacattatcaatgagttaaataataaataacaaaaatacagctctatgaatggttgcaatcacctgaaacaatatattatccaagccaaattattaactaatttcaaggcttatttcaatgccaggtcaatttctggttgatttataattgatataaatacattcatccatttaataaatatttatgtcgtgaataacatttaataacttcatatattaaaataaataaatgcgtgaaacaaaaaggtgtgattatcatgcgacacctggcgttattttaaatacactcgtcatacttcaagttgcatgtgctgcggctgcgttccctcactccagtcacttactttagtaagctcctggggattcgctcgcttgccgccttcctgcaactcgaattatttagagtatatacgtagcgccagatgccgggttgcagaagggagacggcgcttttacacacgcgcggcaaacggtggtggcgccaattagcagaacatatacttttcaatgaatgctactttcactttttcatgaagctcaattgaacgtgaaaagcagattattttcgtgccagacgcataatacgttactccacgcacgtcgcataacccgctgtgcctgccggcttaatggcgcagttttgactcttggtattctcatctacgccgcaatacatgccgctgctcgaggttgatttagataaatagggatagcccagcgtcggccagcctaacgagctaattgaatgatacagcgtcaacaggtcgttattatccggtgctttgctaaggctaccgcactgtttggcaatatcccatttcgtgttgtccaccgtatgcgccatcgcccagtactcgttatttgcatgcactccgttggtaaatactggcgtcacgcctgacagcatctcagcctgaagccacggacgatgcagcgtttttccgttgacggatgtcgtatccgacatatttccccagaacaacgctttatccgtatccgggctggtaagtaccataaaaatcacatccagcgatgcgtgaagagtcgtattgtccgtcactttcaccgtgagtggcgttttcaaccccaggcttttatcctgattaagcgtaaacgttgccgtaccgtcgctgccggtagtgccggtaaagacaatcccggtggtggtcatactttggctggcgcttgcgggagtcagctctttaagcatgagatcgtctgctccggcatccgctgccacgtcgccatccgttatcaccatacctgcccgatttttcgaatcgccacgtgacaacgtaaaaccaacgttggcgaccgggttaccgctgctatcttttaccgtcaccgttaacggcatcgcgcttcccttcggcactaccgccgcatttttcgcgctgtccatcgccgtcgaggtcagcgtaatactggcaggagtagaagtacgcggctcgaccagacacacctgagcaccggtggcagtcgatgaactggcggtgcccttaccgccgctattcaggtttataaattggtaatatccggtattcggcgcacgatccgccgcccaccaggatttgttccccgccaccggccagccgtaatttgtaccgattgcgccgttaggattgtcgctatacaacgtttgcagatcgcccgacaacggctggtattccgcatcacagccggttgcgccagctttttcagtgttcgctgcggtgactaagggccatgtttcattgttaaccaggtaagtaccgctattcgacgtcatctccgccgccagcagcggacgccggaacttcacgcccgcgctgttggtcacggtttccggcatgtgtccccagtatttggctttatcgctgtccgggctggtaatgacggtgaaaatgacgtccatatcgctaactgtcagcggatcgtcgacaagcatcgcctgcagcggtgttctcaggccacgggaatcatcctgcgtcacttcgagttgcgctttaccatcctcatccgtaatgccataccaataacttgtgcacgaagataccgtgcagttaaacgtcattgagcccgtagacggcgcaaccgatgtgagtaccatgcctccgccggaactgccatcaacgacacccgcccggtctatcgaaagcgttcgtcccaaacggatagtggtattgggctgcggcgtgccggaaccatccctcacagtgacggtcaacggcaggctctcgcccttcttcgccactggagcgcctttatccgcatccatggcgctggaggtgagttctatcgacaagtcccggcgctttgccagacaaagctgcgccgtggcggtattggctttggttgtcagcgtattattatcgctgagtctgacatactggaactgactgtctgagtgcgtggcatccggtactgagttacccgccccccaatattttcctgatgccaccggtaggccaagcgttgtcgtgagtgcgccattgggataatcggtatatagcgtctgtaaatcatttaccgtcggcaaccccagccgatcgcacgggctggcggtgtcctgatacatattcggataacggctccaggtataccaggtctcgttattttccgtataacccgacgtgtccgccgttgaagaaagttcagcgcgcagcagcggtcgcttaaattaaacccccttactgttggtaaaggtttccggcatatggccccagtatttggccttatcgctgtccgggctggtcactacggtaaagattgcgtctttgctgtctgtcaggttgctgccgtccatcgtggcggcgctgatagtggtttttaaaccggcggtactgtcctgcgcaagggtaaatgtcacctgtccctgggcatcagtttgcgcatacagatatttcgccgaggtatccagcaggtatgtcgccaggccggacggcatcacattacgcagcgtaatatcgtctgtgacgcttgaggacgatgtggcgctgttggcgcgattgtacgaagatccgcggctgattttcaccatcacgtttttcatcggctgacctgcggcgtctttcacgtcgatggtggcggccatctgctcgcccttcttcgcctttgcgcttccggtggtttcatcctggcctgccagcgtcagcgtcaggctggcggcggcgctgcgcggcgaggcaagacaggtctgcatgtagtacatcgaggtgctggtcgtcgttttgacatcattgccgtcgttaaacaggttgaccgccgcgtagagcgacttcgtgccgtctgacgatatcacgtaatcccccgcccaccagtagcggctgacgttgttgttgcctgaactggtcatcggccagccgttacggctgcgcatggcgttatccgggtatgtcccgtacagcgtctggaggttggctacggtcggtagcgtgtcgcgcccacagccgccaccggtgccgttccaggctttatcgacggttatcatgccccaggtttcgcctttgtcgtagtagccgttggcgatggtcagcgttttgccgggcgtagcgctaaactcgctggccagcagcggacgcctgtacgccacgccgctgctgtcggtcagcgtttccgccatatggccccagtagttggccttcggcgtgtccggactggtgaccacggtaaagatgaccggcagcggcgcgctcgttacgccgttgtgctctattgccgccgtcagcggcgttttaaagcccgcgccgctgtcctggctgatattcagcgtcagcgtgccgtcggcgcccgtggcggtgtaatagttagcgccgctgctacgcccgtcgctgtggtttatctgtatatccgccgccgccgagctattcacctcctgattcgcgcgcccgacgctgtcgccgcgcgtaaagataaccggcgtgtcggcggccgggttgccctgggcatcccgcgtggtgatgatgaccgggatggtctcgccgactttcgctttggcgaatccgtcgctgtcgttatacacaggcgaagtgagcgttatctgcgtcgccgccggatgggcgttttgcaggcagacaaaatagagttgttcattccacaatagcgaaccgacgccgccgtcgcgcagattaatcgacttaacgtagcggttttgcgtactccggctcaaatcggcggtgctgtcctggtagtttttaccatccagcggccagccctgctgggtattcatggcgccgccgggcctggcgtcgtacagcgattgcatatcggcaagggtcggcacgtatcccgcgccgcaggcgtcgttcgccatttcaaaatcgacgattccccacgcttcgttgttttccgtattgtcgccgtgggtaacgccgctggcgatttcagccgataacagcgggcgcttaaacacctcgccgttggccgccgtcgtcgtttccggcatatggccccacattttggctttgtcgctgtccgggctggtgaccacggtaaaaatagtatcaatgctggccgtcgcgctggcgttattgtacagcgccgccgtaatcgcgactttcgtcccgtgggcatccgggcgggtgacgttgatgattttgctgccgttttcaccggtcataccgccgatttgggtggcgctgtcgttgagcgaatcgccgtcaatcaccaccgccgagacgatgccgtcgccgctaccggcgatatgtttctccccctggcgggtatagccgtcgccgcggcttaacacgaacggcgcctgcggcagcggattgccgctggcgtcttttaccgtcactttaagctggagcgtatcgccctttttcaccttcaccgcgtgttcgctgtttgcgttataccacaatgccgcatccaccggctcaatggtgatagacgccgccgtcggatttttgctgaccagacagctcacgtagtccgacgcatcgccggaagcggtatagccgcccgcagccagtgataccgcctgccatgtagcggcgctggcgaaggtggaagaccagtagtcatacgtcgtcggccagccggatactgtgtggattttattgccgtcgctggaggcatacagtgcggcaagctgatcggcgcgcggcagatggccggcctcgcagcccccggcgttggggttattcagcgcgtcggcgtggctgacacgcgcccaggtttcgttatcctgctcctgggtacgggtggcggcagtcgcttccgccgccagctttggccgctggaattccatatcacccacggtgagcgtgtccgccatatgaccccacatctgcgcctccggcgtatcgggactggtgggaacggtaaatttcacgctgcggttgacgggcgtggtaatcagtgagttgaccggcagtacgctcagcggcgtcagcaagcccacgccctgcggctgttcaatcaccagcgtggcgttgccctcattgtcggtcatgccctgatacgtcatcgacgcctgggaagagccgaaaggcgttccgcccatcaccagcgttccgtcgctggagtcggtaaagcccgtcgtggcgttgtcgcgatttttgccgtgcgccatggtgacgataaagctggcgttgggcacgcttaacccattcagcgcattgacggaatggacgttcatcgtgatttgttcgccgactttggctaccgcattgcgtaacgactcatcgccattaaagtaaacgtccagactggtcaccaactcattgccggagcaggagagatagttcggttcggtgccgctgaacgtgctgtccgcaccggtcgccaggttgacgtgcgcggtggtggaaccatcagtatccgccgcgatatagctgtgtttctgcgtcggccagccgtaggtcgtttccatcgcgttgccggaatgggcctgatacagcgtatccagcaacagttgccccggcacctggccggtaccgcactggttcgtcgccgccgttaccgagttaaacgtcgcccagtattcgttattctcaaattcggaaccggtatcctgcgcggcttcgtccgccagcagcgggcgtttgtagatattgcccgcttccaccacgccctgcatatggccccacatgcgcgcctgcgccacgtccgggctggtgacgacggtaaaaatcacgttctgcgtcgcttccgtgccgtcgaacagcaccacgcgcaccggggttaatacgcccgcccccttgtcctgagtcaacaccagcgagaactgaccgttggcgtcggtgacgccgtgatagtgaccgtcgctgccttccagattggtgataattaccggatcatccgtccactgatgcccgctatcaatatcggcattcttttgattctggcgattttgctcgtcgcccaggtagacgttaaggtagcgataaggcagcggtttattggtggcgctgtcggtgacggtgatcttcatgttgatctcttcgcccacctttactttcgccgcgttgaccgttgaatcaaaattgtcggcgctaatcactaatttcggcgtgaccgcaggcggggctttatccacgcagctaaccagcgattgcgtggcgtccggcatctgcgtgaggctgcggctgcgcatatcaatgctgatatggtcagtggcagtcgatccctgggaggaggaccagtactcttcatcaccggatgtcagccctaccggccagccgagggtggtggccagatcgccgcgcgcaatttttaacccttccagttggcgtgcatccggcagaatatcgcagtgcgcgtcggcgtggccccagttgaactgcgcccaggtttcattgttgatgctggcggtgcggtcttcaccgtcggtttccgccgccagtttggggcggtaaaaggtgtagcttgcgccgtccaccgtggcggtggacgtctctgccatatgaccgtacatgttggcgctgctgctgtccgggctggtgagggtggtaaaaatcacgtccacgctggctttcagcgctggcgcgctcgacgggtgcgctatcagcggcgttttaacgcccgggccgttcgcctgggtgacgaccacggtcgccacgccctcggcgttggtcgtaccgtgatattccgtggcggtggtggtcagttcggtgttgccgacgcgcaccggcgcggcattgtttaccacgccctggcggttttgcgcgtcgccgcgggtaatcacgaaatcaacgttgccctccggttcgccgccgcagtctttggtcgttaccgtcagcgtgatgctttcgcccgctttgaccttcgcggcgttgagcgactcgtccagatgatcggcggcgagcgttaccgggtcgcccacggcgggcgcgatatccacggcaaacttttgatcaagcacttcgaccgccgtgttataaggcacgccggtgcgggtaagcaaccacagcggcggtatggcggttgaggtatccagttgcgaccagaccaccagatggcggcccgccagattctgcgcgcagaaacttatattgctgacgggttgtggatcaagcggcgtgtccggcgtggcggcgtcggcccacaccagcgtgacggtgggcgcgcgttcagcctgccagaccagcggcggcacggcgaagatatcgccttcggtgtcgtgcggattggttaaggtcagcgcgctgccagcatcactggtgctgaactggctgggcttcgcggagtagtcaacaggattcgccgcatcagagcgcaactgcacgctgccctgatataccgggatcgttacactgtcggcctgaggcggagtgccattaatagccgcagtttgctcagtgagttcctgccatgcgccgctgcttcgcacggcctgcgcgaagaaaggcgttaaactgagggcgcatagcagcagccagggtaaaaaaccgacacactttttcgatttcactgacgtacctgagaaaagtccatttcgttgcagttcattccatgaatacaaaaacgtaaaaatacatcgctaccggaacagcgccagctacaagggatacccaggttgggcgccgcaaagcgtcacccaacattcaaacgcgctcccggccccattccccattcactacggcacccggcacgagcctaagcctgaggtcgtcgctttttcacgagtacaggttgtctggccggtcgtttcgttaaatgaacagtagtacttattgctttgaccttcatcttgcgacacatagtcccaggatgatgtcgtcggccattgcaacgtgccgataacgctctgcaacgctttcagatcgtccagcgaggctatattttcctgcgatccgcaaagatgcgtcaacgacgtttccacgtgttcggactgataataatagttcgtcccccagatttcattattaaacggccaggtatcccggggcgcggcagagagctcggctttcaggtacgggcggcgcagcgtaacgccgttcacctgcacggtatccggcatatgaccccagtatgacgcatacggcgtgtccgggctggtttgtaccgtaaagattgcatctacgctcgccgcctcatcaaattgattcgcaagcgccgccgtgacagacgtttttaaccccagcgatttatcctgagttaacgtaaaccgcaacttaccgtcatcgccggtgaagccagaccattttgtgctgaggccattctggttattaaacgccactgccgtacccgcaggtgcaaccggcgtcagcatcatattcgcaggcgaagttgtaaacggaaccggctcgccaatcacgcctggttcaatgtattgcttatccaccgcaccgcgcgaataagcgtaatcacgcgtcaacagtacggccaccccggcctgcggctgcccggcgtcgttagtcaccgttaccgtcatcggtatcgtttcgccttttttcgccacggccgccgatttatcggcgttccatgcgtcggaagagagcgcgatattcagcccgctgcgcgatgttgtcaggcagagttgtaagtagtagttacccgggttttccgacatgctgtagtttttccccgtcttgagatctttatactgccagtaaagggttgagcctttcagcaggctatcccccgcccaccaccgcttcccgacgggcaatccaatatcggtcgccaccttgccgcttgggtgatcgttgtacagcgcagtgaaatcatctatcgcagccatctggttcatcggacacccgccgtaattgccggtattaaaactattcaccatgatccagttttcattggtttcgaaatatgtatccgtgtgcgcctccgatgagggctcgcctgccaccagcgggcgcttaaactccgcaccgttgctggcggtgaaggtctccggcatatggccgtacatgttggccttgtcgctgtccgggctggtgaggacggtgaacaccaccggcagcgatgaggtcgccgtcggcgtatcgttcagattcgcggtcagctggtttttcaaccctatgccgccgggttcggcaagcgtcagggccagcgtaccatccgcgccggtggcgccggtcagaaccgatgtggcatagtaaaactgttgctgcgcaccggtgagcggcgtcaccgtcatgttggtgccgttagtggctacaaatttattatagtcggtgttgcgcgccttcccggcgtcgcgtttaagcgaaaaagtcgcataaggcaccgggttgcccatcgcatcggtagtggtgatgagtagcgggatcgactcgctgtttttcgccttcaccgcctgaatagcgtcatccatcgcctgcggggaggtgagggtaatctgcgtggcctgcggcagcggcgtcgtggcgcaaatttgatactgccaggcagtgctggtcgcgctgttttctgaccgacgcgaaccatcagccagatcgactgcgtaatagaagtcaagttttgccccgctggaaaatgacgtcgagttcgatccgctccagtaagaatagtagaccggccagccctgggcggtatttatcgttcggctcgggtatttgctgtagagcgaatccagcgcctcaacggcagggtaatagcccgccgcgcaacgggccggattggccccttcactggctggcccatgaaaaaccgcccaggtttcgttggtttcttgcttagacgcagtattgtccgtactggacagctcagcgtacagcagcgggcgctggtacaccgcgccatccgccgccgtcagcgatggcgccatatgcccccacatgcgggcgacgctgacatccgggctggtgacgacggtaaagatagtgtcgatgctggcactcacggcggcattttcatacagcgtcgcgttaatcgcggtgcgggtgccgtgggtgtccgggcgggtgacgctgatgatacgggtgccgtcagtgccggtctgcgaccccattttggtggtggtccatgccagcgattcgccgtcgatcaccacgggcgtcacgatgccttgcagatcgtcaccgtcctgagcggtatacttttcgccccggcgatcgtaaccgtcgccgcgggtgagcacaaacggcgcttccgggatcgggttgccgctggcgtccttcaccgtcaccttgagctgcatcgtctcgccctttttcactttgaccgcgtggacgtcgctgccgtcgtaccactgcgacggattgaccggttcaatggtgatggacgccgccaccgggttatcgctggccaggcagctggcgtaaatcgagacgttgctgttggcaaattcactgccgttcgtcagcgcgatcagtttccaggtggtggcgctctggtaggtggacgaccagtagttaagataggtcggccagccctgaatgctgtgaatcttgccgccgctgttggcgttatacagcgcctcaagctggtcgatgcgcggcaggcggttcgccgcgcagccgcccgcatccgggttgcccaccgcgtcgctatgggccacgcgcgcccaggtctcattgctctcgtcctgggtacgcagcgggttgctcacttcacccgccagtttgggccgctcaaaagtccagtcgcccacggtaatcgtgtcggccatatggccccacattttggcttttgccgtatccgggctggtcgcgacggtaaacttcacgctgcgggaaaccggcgtattgatgtatgaattgacgggcacgatgcttaacggcgtcagcagccccacgccctttttctgggtgaggataatggtcgcatcgccgttagcgtcggtgatcccgtgataaacctgcccggcaacgtagcccacgtcgtcaaactgcatctcgccgttgctggtatcggtaaagccggtcgtcagcccgtcacgccgcctgccgttcgccatggtgatggtgaagtcggtattgccgatcgctatgccgttaagggcgttgcgcgaatggatgttcatcttaacctgttcacccactttggcgtcggcgtttttgatcaccgggtcgtcgttgaagtagacgtccagcaccgccaccatttcattggccgagcaggtcaggtagttgggcgtatcggtaaatttgccgctatcgccgttttcgaggttgacgtgtaccgtcccggaggcgtcgctgtcggcggcgatgaaataatcttcagtcggccagccgtgctcgctttccatctgtccgcccgcatgttcgctgtacaaatgcgccagcgacgactgatccggcacctggccgacaccgcactgcgcggtggccgacgccacggagttaaacgtcgcccactcttcgttattttcgctgaattggccgtctttatggctggcctccaccgccagcagcggacgtttgtacaggttgcccgcgtccaccacgccgcgcatatggccccacatgttggcgccgtccacgtccgggctggtgaccacggtgaaaattacgctaaaggacagctcgacgttgccgccttcgtcgtccggcatcacgatgcggatgggcgtttcgacgcccaggccgctgttatgttttaacgtcaggtgcgcctggccgttgacgtcagtcacgccggtatagtgctccggcgacgaggcgctcataccttcggaatcaacggtgacccgcaggttatcccatgcgtcctgatgttcccctttgcggtttttcgccgggtcgataaacagctccatgtagcggtaaggcagcggtttttgcgtgtcccggtcaactacggtcatcgtcagatcaatcgactcccccacctgcgctttatacggtccttgtggggagagagtaatctgcgggtgcgccgcaggctgggctttatccacacaactgaccagcagcgtgtcgctgtcggcggccctgacgaccgatgcgctgttcatatgtacggcagcgtggtagccgctcatctgatctttggtcgacgaccagtattcggcatcgtccgtcgccggccagccggtgtacgttgccagcgtgctgtgctcatgtcgcatctgcaccagttgttcggcatccggcagaatattgcaatggttatcggcgccgttccagtcgaacagcgcccaggtttcgttggtatcgacgacgcttttgtcagcgccgctcgcttccgccgccagcttcgggcgggtgaaggtgtaggttataccgttcagcgtcgcggtagcgctctctatcatgtggccgtacatactggccttatcgctgtctggactggtgatggtggtgaaaatgacgtcgacattgtcggtcagcgtgggatagttttgcgaagagacgataagtcgcgtttttacccccggaccgttctcttgcgttaccaccaccgtggcgttgccctgcccgtccgttacaccatgatattctgtttgcgcagtcgttaactcggtattgccaacgcgcaccgggttagcgttattgaccacaccctggcgatttattgcatcctcgcgacggatcacaaacggcgcattgatcgcaggttcgccatcacacgctttggtggtgacagtaagagtaatactttctccgaccttaactttcgatgcttcaaaactggcatcgacatgatcgccgctcacagaaacagggtcgctcaccgctggtttgatattcagcgccactttcgggcttaacagcggaatggtcgcataattcggcaccccggtacgcgtaaagagccacagcgcgggaacgttggtttcatcttccacctgcgcccaggccaccagctgtcgcccggcgaggttttgggcgcaaaaggtcaggttcggaaccggctgcggcgagagcggcgtgtcgggcgtggcggcatcggcccataccaggcccatggcgggcggctggcggttttcccaggcgatggtgggcggatcgctaaagagatcgccttcggtatcggtggaattgaccgcccgcatcgaggttgaggtagcatccgcgctaaaatcgcgcggcatggcgctgaattcaatatcgtgggttttgctcgggtcaagcagcgtacttccctggtaaagggggataatagcgccgtcggccagcggcgcggtgccgttaaccgcaccggtgactgagttcagctcttgccaggttccgcccttcaatagcgcctgcgcaggtgcgatcgacactgcaaacatgatcagtaatgtcagtaagaaatgtacaactttattcacttgccgattcctgtccatgagcgatagccacccgttttcattctctgtcgtaattcaacccactttgcttagcgcgcggctaagcaaagtgcgcggaaaataccactccccgcggggagtggtatgttgaggacaacttatttgcgtttgtagtcgatggacagaccaaagccctggacaccgtcgctacccacggtaacgccgccttccgcaccctcgaacgcctctttcgcttcggcgttggtaagcgggatgacaaggtctttatcgttccagttttcgttgacgataccaccagtaccggtacctgcaattttactggtgccgacgaatttccagcggtagtcatactggtcggtaacgttttcaccggcatcataggtgccgttgccgtttttatcgctccacagcaatacctgataggtagtattcgttttgagtgtcgtccctgaattcttcaacaggttggtattcgaatctttctcatgaataaccacatggacgttttcatccaccaccggaccttccggaatttcgtcatcatccgaaccaccgcccgcatcggtcgacaagtctttcaacagcagttcggttgccacggcagggtcaccggtggtagtggttggcgtgattttgataccgatataacgatccgcatcagcggcctggatttcataactgtcaccagtaccaagatctttggggtcgctgccattctgatcgctaaagctcacccatttcacggtggctttagttgccgtgttgtcggtgtccaggtcgccttccgtatcgccaatcgcccagttcaccgtgaccttatcgccaacgtggaactgcttatcgccttcggtcacaattttacgatcgccgcgatcgatagttaccgttacgtgatctttgtcggtatccgcagttttatccgccgcacgggtaatccacggcaccgtaccctgaatggtgcccgtctgttcagagacaatctgccattgccccgatttcagattaccgtttgccgccaccgctggcgcggcgcaatacccggcaactactaatgctaaagcgaccttcgtcagccgccgttttactgttgcttgcattcagactctcctttttctcaaaattcagcggctggctggtcagccacaacgctgacgctatttctgactatacgtaacgcgtatgccgtaaccctgaacgccatcttccacattggcggcaaacttctgcgccgcctctttattggttactggcaggacaagatcttcattcatggtgttggccagcgcgccggtatgtccgtttgtactctgcccggtaaactcccactggtagtcgtacagcgccatctcttcttccgtgagctgctcggacatctggaatacgccgtctttatttttgtcgcgccacagcaggaaacggtaagcattattgaccgtagggtgcttatcttctttgccgataaggttgacagggttggcggctttgacctgataaatcaccgcattcagcgcgctcaggttgtcgccgataaaagtgacatcaacgtagttactgtcgccataggcgtctgctttcgccttccagcggaaagtccccggcagggtgctggaaagcgtcaccgtccccgcttctttgtcacgactggcaataaacacgcagggggtttccgtggtgcagggcgtctgggccagggtgacttttttatcattgctgtcgtacaacacgggcgtcatggcatcgtccaccagttcgttaccattgcgatccgtggagtcgccaaaggaatcggtgatcagcagatccatcaccacgccgtcttcgccatcggccagcgcgctggcttcatggctgtgatcgctgcgatcggtatcggcaatgttgtcgacgatcagctcaattttgcgatcctgctggacggtgatttccaccacgccggagttctgcttattgcccttttcatcttccagcgtcatgcgtactttccaggtgttcagggcggtgcgctgctcttcggtatcggcattaacccaggcaggaagcaccagattccagctgttattgttgccttcggttaacgcattagcttttaccaccggcatcaccagcgtacgggcggcgttgtttttcgcctgccaggaggcagaaataattttgtaatggtggttaatcagcgcgttgaccgtccacttacatttctccagccccaccgcggcctcaggcgtatcttcaatcacgcattccgggtgttcgttggtggcgtcagccttcagccacaacgtgacgtccagcggatctttctcacgatattcgagaatgatgaaattgttacgatcgacaaaatcggtgcggctgcccattaaggagtgctgaattttaacgttttccggatcgagctgcgccgccagcggcgtgcctatctggtagttcacggtcgcgttaacgctaaagtcgttactatcgccagtaccggctttgtaatccgtaccaaccgtgaccagcggtaccggcgtatattccagccccaaagtgacggcatgaggatctttttgcagattatcggtgccaaacagcgctacttcatcgccgtagtactgttcgtaaactaatttagcgccaagctgcggataaaacggcagccagctttccatgcggatatcccagccgcgcgcgggtcgttcttcataaaagtcgaaatcttcggagtctttccagtcagaaagaggatggtaatagttgccggagaatttcaggtaatccgtccaggcttcggttcccagacctaatcgacggtgaccgcgcgtaaaatcgtagtcatagaatgcgttgccgccaagcagccagttgccgacgttctggcgaacgccaagcccaaagttaccaatggtgcggtcttccttacgctgagccgaaatctggctaaagaaaagcgtgctctggttgtcataccagggaataaaataatccagcgaactgccgtccagatcgccgccttcgcccacggacaggctggtacggatcttgccataaggtgacattacaccttcaagatatgactgtgctgaggaagtgatttggttttgcaaataggcagggaggagtggctttcatcatttgcagatgcagagttatctgcgccagaagccgcaactgagactccagacactaatagcaaaaccagaatgcgaatccttcgcaccatatgatatccctgtcgttaaataaacacgcctctatgaaaagatattatatggatgattcagatggaatcataactaacaggcctaaatatattcctaaaaagaaaagtttaatatgaaacagatttataatattgatataataaataaaaagaaagctgttatttatttctaatattaattttcgggaataatattccctataaatagttgaatcaataaaaagaataaaataaccgccgggcaggatactatgctgatattacgggagtatcgaataacgcttttgcccttagccggataagacgtcggcgcctctgctctgcggcgcaacgtcgacagcggttttattgatcggaaatgacgaaattaacccgtttttttgaaattaaaccatgaccgttctggcaaaaatagtccactgcgccgcaggctttcaaaacctgtaacggctggcggcagtcaggacaaagtgcctgtaacgagaaatctttagcgcatgtctcgcaatgcgcagtatcgccattgcgctccagcgcgtgatggcaaacggggcaggttatttccataacattctcctcaggcgcatgactcacttttacttgaaaggcctgatagcgcagcgcttgtcaggcctggaatattactgaaaaagcattacttgcttttcttgatatgtttcatcagacgcttacgtttgcgcatttgcgttggcgtcagtgtgttacgcttgttcgcatacgggttctccccttctttaaactgaatgcgaatcggcgtccccatcacttccaacgacttgcggaagtagttcatcagatagcgcttataggagtctggcagatcttttacctggttgccgtgaataaccacaatcggcgggttatagccgccagcgtgggcatatttcagtttcacacggcgaccgcgcaccagcggcggctgatgatcttccaccgccatcgtcatgatacgggtcagcatcgcagtgctcacccggcgagtggaactgtcgtaagcctcgcgtacggactcaaacaggttgccgacaccgctgccgtgtagcgcagagataaaatgaacgcgggcaaaatcaataaagcccagacggaaatccagcgtctctttcacctgctctttgacttcctggctcaggccatcccatttgttgactacgataacgagtgagcgcccactattgaggataaagcccagcagagacaaatcctggtcggagatcccctcgcgcgcatcgataaccaacagtacgacgttagcgtcttcaatcgcctgcaacgttttaatcaccgagaacttttctaccgcatcggtgatttttccgcgcttacgcacccctgccgtgtcaatcagcacatattcccgttcgtcgcgttccatcgggatataaatgctgtcgcgagtggtgcccggcatgtcgtataccaccacgcgctcttcgccgagaatacggttagtgagtgtggacttacctacgttcgggcgaccgacaatcgccagctttatcggcaggctttgcgggtcaaaatcatcttccggcgcttcttcaccattttgttccacctcgaactgcgcccagtattccgcgtcttcatccacctcttcctgcggcgcgacatcatccatccacggcagaagcacatgttccagcaggctcaatacgccgcgaccatgtgaggcggcgatagggtaaatttcgcctaatcccagcgagtaaaaatcgacaaccgcctgatcgggatcgagaccatccgttttattcgccaccaggaaggtcggtttttcacgggaacgcagatgtttggcaatcgcttcatccgccggcatcaggccagcgcgcgcatctaccatgaataacaccacatccgcttcttcaatcgccagcagcgactgttccgccatccgcgtttcgacgccgtcttcggtgccgtcaataccgccagtgtcgatacagataaactcgcggccttcaacctccgcacgaccgtacttacggtcacgagtcagacccgggaaatccgcaaccagcgcatctcgggtgcgggtcagacggttaaatagcgtggattttccgacgttagggcgcccgacaagcgcgaccacaggtaccatgtttaaagcctcatttaaaaaatcatcagacaacgcgcgtcatttttacgccgttgttaaaaacaggaaaacggcccctacaccaggagccgttttttaaaacacacaaccgtgacgattaacgcgtaatcgcgtagaccgtaccgtctttggcctggatgagcagtttaccatccgccaccgtcggttcggtcagaaaaccggaactgtctactttttgttgggccacaaaacgcccgtcatcaacattaatccagtgcagataaccttcgctatcgccgacgactaaatcaccattatacagcaccggggaggtcagcaaacggtgcagcaaatcgctttgcgtccacagcgttacgccgccgtcagtggtcagcgccagcacgcgatcgttctgatcgaccaggtagatacggtctccgtcgacgataaagtcattgaccgaacccagctcgcgtttccacataatctgaccactgcgcagatccagcgccgttaagttaccattatacgccaacgcgtaaacgacgccgtttaccacaaccggcgtggtatcgacgtcgctcagacggtcaatttccgttgggccagtggcctgggagatacgctgctgccaaatcatctgcccttgttgcatcagcacggcgctgacgcggccattatcaccaccaacgatagccgcgccgaacgcggttgccggcgcagattcgccgcgcagcgacagcgaaggcatatccaggttcaccgtccatttaattgcgccatccgcctgatttagcgcctgcaactgaccgttgctggtatggataagaacgattccatcactgacaaccggacgagacaacgcttcgcctgcgaccttcgtctgccatgctgtggtaccgtcgctggtattcagcgcataaacctcggccttttcactgccgatatagacgtgaccgcccgcgacagtgacgccgccggacaacaacgcggacgaacgagagaaccagccgtctttctcgcccagattcacagaccagatctctttgccatcatccgcattgagcgcttttaccacgcccgcgcgatcggctgcatagaccacgttatctgccattaccggatgaaggttagaataaaattcgccaattccgttaccgacagaggtgctccagacagtggtcggggtaaactggttttcaacctgcggtaatggagacatcttgacgacatcttcttcgccgctaaacagtgaacagccgctgagcagggtaacggaaagcaaccctggcagaagtaatttacgcaattgcatcgggtccctctcagatggacaaattattgattttcatctgcatcatttcgctcaacgccggagaagcatcgctattgacgcccgcttcccatgcgctgcgcgcgccttttttatcacccttactcagcaacgcttcgccgcgcaaatcagcgacaatggctgtccatccttcgcctttaacggcatccagagttttcagcgcggcgtcggcttgcttaagctgcaactgaacgcgagcgagacgcagattaatcaccgctttgagattttcatcgctggtggccgccaacccctgctgcaactgggcttcggcttttttaagttcattcttatccacaaactgctgcgccagttccatagacgccagcgcaccataggtgtttttattctcagccgcgaatttttcagcggcgggaatgctatccggcttatcggcgcttaccgccgtcaccgcattttgatacgccagagaagcagcacgcgcggactccgtctgatggctgctccagtaacgccagccaaccagcgcgccaacccctaaaatcactccgacagccagcgctttgccgttttcggcaaagaagcgtttaatcgcatccacctggtcgtgttcgttctcgtaaatttccacgctgtccttctccttagcccaataaagtgcgcaaatgcgcggcgacgctgtcctgcgccactgccgtttgctcaccggagcgcaaatccttcactacaacagtcccatcggcgacttcagattcgccaagaaccagtgcaatacgggcgccccacttatcggcgcgggcaaactgtttcttaaagttgccgccgccgtggtttgtcattagcttcacgcctggcatttcatcgcgcagccgctccgccagcgtcattgccgcagactgcgtttgtgcgccggcagctaccaggtatatatcgacaacaggagaggcaataaattccggattaactgcctgaactaacaaaacaagtcgttccaggcccatcgcaaagcccactgccggggtagcgcgaccgcccagttgttccaccagaccgtcataacgaccacccgcacagacggtgccttgtgaccccagactgtttgttacccattcaaatacggtgcggttgtagtaatccagaccgcgtaccagacgctggttgacggtgtaggcaatccccgccgcgtccagcaatttacacaggccggcaaagtgctcgcgtgaatcgtcatcgagatagtcgccgagagcgggcgcgtcgttgagcagcgcctgcacgtccggattttttgaatccagcacgcgcagcggattggtatacatacggcgtttgcagtcttcgtccagcgtctcttgatgctgttcgaggaacgcgaccagcgcatcgcgatagttcgcacgcgcctctaaggaaccaatagagttcagctccaggctaacgtgttcagagatgcccagcgcgcgccaccagcgtgcggtcagcataatcagttccgcgtcgatatccgggccttgtaagccaaagacttcggcacctagctggtggaactgacggtagcggcctttttgcggacgctcatgacggaacatcggcccgatataccacaaacgctgttcctgattgtacaggagaccatgttcgatgccggcgcgtacacagcccgccgtaccttcagggcgcaatgtcaggctatcgccgttgcgatcctcaaaggtgtacatctctttttcaaccacgtcagtaacttcaccgatcgcacgtttgaataacggggtctgctctacaatcggcaagcggatttcactgtaaccgtagctgccgagcacgtttttgagtgtgccttcaatgcgctgccagatggcggtttcgccaggcagataatcgttcatgccgcgaatggcttgaatgttttttgccacgtttattctctttctgaatataaaaatgaaccctcagcgcttccccgaacgaaccgggagccatgcgggttcaatcatacacgggaagcgcgccgcttcccatcacgttcttatttttcaacctgcagcacgtcaatccgacgcgcttcatcaagttgacttgctttcgcgcgaatacgggattcaagctgcgcgatcatatcgtcgttatcgagtctgtccttacgcacgccgtcttcatacaggccgcttttcttattgccgcccgtcacgcccagcgtcgataccagcgcttcgcccggcccgttcactacgcaaccgatgatcgagacgtccatcggggtgatgatatcttccagacgctgctccagcgcgttcaccgtgccgataacgtcgaactcctggcgagaacaggtcgggcaggcgatgaaattgatgccgcgcgcgcgaatgcgcagcgacttcagaatatcgaaaccgactttgatctcttccaccgggtcggccgccaacgatacgcgcagcgtgtcgccgataccttccgataacagcagacctaaaccgatcgccgacttgaccgccccgctacgcgcgccgcccgcttcggtgatccccagatgcagcggctgatcgatctgtttagccaacaaacgataagactcaacggcaaggaatacatcggacgcttttacgctcactttgaactgatcaaagttgagacgatcgagatgatcgacatggcgcatggctgattccagcagcgcctgcggcgtcggctcaccgtatttttcctgcagatctttttccagcgatccggcatttacgcctatacgaatagggatgtttttgtcgcgcgcgcagtccaccaccatgcgaatgcgttcttcgttaccgatattgccggggttgatacgcaagcagtcaacgccgtattccgctactttcagcgcaatgcggtagtcgaagtgaatatcggcaaccagcgggacgttaacctgctgtttgataagcttgaacgcttcggcggcgtccatggtcggtacagaaacacgaacaatatctgcgccaacgcgttccagcgctttgatctgattaaccgtcgcttccacgtcagtggtacgcgtgttagtcatcgactggacggcgatgggggcgccatcgccaatcggcacattcccaacgtaaatacgtgtcgattttctacgttgaatcggagcctggttatgcatgaaaaatctcccgcgttacccgtctgttactgcgccggtgtcggttcggcattaagggtcagacgcgcaacctgattagttctgataaagcggctcagatcgacaggttttccttgatactggatctgcaccgcggccggcgcgccaattttaagtttataaggcgcctgaccggttaggtttaaattaccatctttacgctgcataccactaaacagcttcttacccgtggcgtcagtgacttcgagccagcagtcagcggtaaaattcatcaccagcgcgttcggatcggcagcaggcgccgctacgccagcctgactggtcggcagcgcggacggcgtctccgttgccgctggcgcggcagatgtcgcagccgtatcgacattcgcctgcgaaggcgcgactaccgtattttgcgttgccgccgccgttggcgctggcgtttgcgtcgccgccgtcgaatcaaccggcgtcgcaggcgccggagccgtttgcgctggcgtcgtatcctggcttgtcacggcaccggtgtccagcggtacgctttggccgctgtctttatctgcgttcagttcagccgtgctttgatcggccatcgtcgtgatctcttcctgctgcgccttgtggttctgccaccaccaggcgccggtcagccctacgaccacaaacagtaccagccaggtaaaagacattaaccagccgtcgcgttttttacgacgctttcctaatgagaaactctgcatcggggcgactttagcggcgcgcagcggagcttgtttttccagccccggcagcagttcctcttctggaacatgcaccagacgcgcatatgagcggatatatccgcgcaggaaggttgaagcaagatcggacggcgccttatcttcttcaatatcgcgtaccgtagaaaccttcaggcaaagtcgctcagcgacagcctgctggctgagtccgagttgttcacgggcattgcgcagacgaacgccggtggtttgtgcttcattttggtcgtgcgtggcttcagtattcattcgctacagctacaggtacgtgtaaattaggattcaggcgccgacgagccgtaatgcccgcccacaccgcgaaacatcaggttagttaaccttagtcagacagtataagcctgtcaggccgcagatgacaaaaccgctaagacacaaggctaaactcttgttgcaccattacatactgccttaaagtcgacaaaaacgcaccgttattattgaccagacaagtacaacgccagacattattcaactgacattgcgccacggtataatgaatgccccgtggcacaactgctatcaaatagccttgatgtcaatcacctctccctgcatacgcttacgcagggtacgtttagtacggtcaatcacatcgcctgccaactgtccgcatgccgcatcaatgtcatcgccacgcgtcttgcgtacgatggtcgtgaaaccataactcatcaaaactttagaaaagcgatcgatacggctgttagagctgcggccatacggcgcgccagggaacgggttccacggaatcagattaatcttacaaggcgtctcttttagtagctccgccagttgatgcgcgtgttcagtgccgtcgttgacgtggtcaagcatcacgtattcaatcgtcacgcgcccctgattggcgttggatttctccagatagcggcgaaccgcgcccaggaacgtttcgatattgtattttttgttgatcgggacgatttcgtcgcgaatagtgtcattcggcgcatgtaaggagatagccagcgcgacatctatcatatcgcccagtttatccagcgcaggcaccacgcctgacgttgagagcgtgacacgacgtttggacaggccgaaaccaaagtcatcgagcataatttccatcgccggtacgacattggtcaggttaagcaatggctcgcccatccccatcatgaccacgttggtgatcggacgctggccggtgactttggccgcgccgacgattttcgccgcacgccagacctgaccgataatttccgatacgcgcaggttgcggttaaagccctgctgcgcagttgaacaaaacttgcactccagcgcgcatcctacctgtgaagagacacacagcgtagcgcggtcgtcttccgggatatagaccgtttcaacgcgctgatcgccgacagcaatcgcccacttaatggtgccgtctgaggaacgctgctcttcaacgacctccggcgcgcggatttccgcgacctcttttaatttgccgcgcaacactttgttgatgtcggtcatctcatcaaaattatcgcagcaatagtgatacatccatttcatcacctgatcggcgcggaaaggcttttcacctaagtttttaaaaaactcgcgcatctgctgacggttgagatccagcaggttgatttttgtttcgttgttaagaactaccggggtactgctttcaggtgtgacaatttgttcagacatatgctattccggcctcgttattacacgttatggcccctggagggttgaaaaaagaaacgccccggtaagcatactgctcgtccgggggcgctgcattgtacaaattctggcgtaaggatgccacgtctgcacgcggcattagcaaaaataatatttgaaccgataatttaccgccaacgcatttacagcgtgaaagacgaaggagattaacgggtgcgcgggcacacttcgccttcaccgaagaaaaaggcgatttcgcgctgcgcggattccagcgaatccgaaccgtgggtgccgttttcagttaagctatcagcgtagtcggcgcgcagcgtacccgccaacgcgttcgccggattggtggcgccaagcagatcgcggtgacgctgtaccgcattttcactttccagcacggataccacgatagggccagaggtcatgaactccaccagaccgtcaaagaacggtttgccgtcgtgctcagcatagaagccgcgcgcctgctcaacggtcaggtgcagcattttagtgccaacaattttgaaccctgcagcttcaaagcgcgcaaagatgctgccaataacgttttttgccaccgcgttgggtttaatgatggaaaaagtccgttcaatagccatgtttacctctgaaatatgttctgttgttatgtcaggcgcggattataaagagcatcccatcaattgcctatggatataggtaacatttttttaaaataaaatgagcattagcaacaaaagttaaagacgcacagcaaactcaggggactgacacagcacgcagtgcgtgtgttcaggcgtgagagcatggaaagtacgtttgcagatgtcgcaggtgagcgtatgcgccgcactatgccgcgttgaggcgggttccacgtcaaaccgcagccgcagcgcctgatgcggacataccgccgcacagccgccgcatcccgtacaacgcgccgccgctatcgtcagggtattgtcgtcaaactggataacgttctccgggcagcttcgccagcaggcgccgcacatcctgcactcttgcggactgatttcgggtacgcattcgctgaacgcggaaaacgcctgtctgagacgccgtttccccggctcgacggcacacggggtaatggcgtcgcgcggaacatgaaacagagtgcgccgcgaggcgttaatctccgcgccgacaacgtgtttgaaagaccagcccggctcgccgtagcggcgcagcgctaaatttagccccgccagcgccatcagccactgcgccgatcgctccaccgcaatatcaataaagcgaataccgtactggctgtgccagagaagcagttcatcgaccgttggcgcctgtagcgaaaacggccccaccaacgtatccccctgcacaaagcgtttaaccggtttgataccggtaatggcgtcaacaggacagacaaacagacagtcgccacaggctatgcagcgtgtcgtatctatgctgacctgcccctgcgccagcgaaaacgcctgcgccggacaaacatcggcgcaagcgcggcaggaagaaaaacgaaagcgacgacggacgcaagcctgcgtcacgtctaccgccggatcgatcgtcaggttaaccatcagccaatactaaagaagacgtagcgcagcataatctcgccgataagcagcaatacgctgcccgccaccagagttcctctggcgtttcgcagaccgcctgcggcaaagcagagcattcccgccgctgagacacaccagccgagaagatagacgtcgcgcaactgcgccagcgcctgtagcggatgatgcgggaaagtgacgaccgtcgtatccactgcattaatatccgccagccatagcggctgcatgatcaggcgaatcagcaccatcagtgcgaccaccaccacagcgcagcgcattgcggcgccagcgttgcgcagataagccagcgcaatgactaccgagccgataatgcctgatgtgccaaagaacagcgccagcgtgttgctatgctgccaggtcgccaccgaggcatggatataaacctgcgccatgcagaatacatccaccagcccgaacgctgccgccaacgccagcagcggctgccagcctggctttcggaaaaacagcagcacaacccccagtcccagcgccgccagataaaggctggcaaagacgatttcgcgactcagccacgaactggcgacatgacgtaacgcatttagcgcattcaggggatagcccatgtgcagcgctgaagcaagcagccctacgcaggccagtacaaacgcccccgccatcgcgggaagcgcgccgcgtgcaggcacgcgtccctctacggcgtactggcggcccaacgccagccacactgtcacacccacagacccttgcaaacagagcgtaaaaatcagcagcggtaactcatgcatggcgtttaccctctttttctgcgccctgatgcgctttgacaaccagattaggtttggttatggatgaatctggcagcccgttaacgtcgcatacgctaccgtacttcgcgcgcagttcatcaatcggagcaaacttgatggcctccagcggacaggtcgcaacacagacgggcggttcacctttcgccagtaaatcaacgcacatgtcgcacttggacatttggccggtctgctcgttaagctgcggcgcgccgtaagggcaggaccaagcgcaatagccacagccgacgcatttgtcggtatcaacgcgcacgatgccgtcgcccgggcgtttatgcatagcggtagtcgggcaattcttggtgcagacagggtccgcacagtgattgcaggaaatagaaagcgtataagcaaatacgttattgctgaccccgccctgcccggtcgggatgaaacttccgcccttgacttcatagacgcggcggaaacgacggcctacttccagattgtttttgtctttgcaggccacctggcaggctttacaaccggagcagcgtgaggagtcgatgaaaaaccccagttgtttatcgctcaccggcgggtaatgtgtaaactgactcatgctttagccacctccaccagcatggtttgatgtgaatttcccttcgccagcgcggtaatacgggccgagctgaggacgttcgcacagccgcctttatcaacgccgttttcatccggctgccaccaggcgccagcctgcattgcgacaacgccgggaataatgcgcggcgtcacttccgccgggatttcgcaaatcccgcgtgagttatgaatacgcaccatgtcgccatgcgtaatgccgcgcttttgcgcatcctgcgggttgatccacaatgtctgctgctgcacttcaatcagccacgggttagcgtattgcgttgagttggcgcggttttttcctttccacgtaattaactggagcggaaaatctttcaccagcgcatcctccgggccttcatgcgcgggaacgtagtgcgacaacgccgggatttccggatgctgcatgtcgtacaggcgcttcgagaagatctctattttccctgacggcgtcgggaacggatgattgtccggatcgcgaatattgtcttcaaaggcgataaatggcgcgcttttgaacagatgctgacgggtcttttgcagcgtggcgaaatccggtagattttcgtccggcatcgccaggcgcgtctgttcccagatgtgttcaatccacgctttctcatcgcgcccctggctaaattcgttttcaatgcctaatttcgccgccacctcacgtagccagtcgtagtcggagcgccgctcaaattcaggctcgatcagtttttcagagagtatcaggtagcttgccgtgccccaggtttcaccgatgttccagcgttccataaagctggtttccggcagcagtagatcagcgtatttcgcgctcggcgtcataaacagatcgctggcgacaataaactggatctttgattcatcctccagtacgcgtaccgcctggtgcagatcggggttctgattcgccagatagttcccggccagcgagaacagaatacggatgttactgtccagcttatcggcatctttcagccccatatccggcgtcactttgctggcgtcgtctgcggcctgcacccagttcatcaccgaaattttggcttttaccgggttatccggcatctccggacccgcggcaaatttacggttagcgcagccgccataacccgcagcccaaccgcctttgatgccgacattaccggtaatggtcgccagtagggtcgagccgcgcgcggtgcgctcgccgcagttgtggcgctgtggtccccacccctgaatcaacgcggcgggtttggtattcgcgtaatcacacgctaactggcgtatggtttgcgccggcacatgggtgatcttttccgcccactcgggggacttaacgacaccgtctttggcgccggtcagatacgccaccagcgattcgttagccggtacgccttccggcattgagtcttcgtcaaaaccgatagcgtagcgcgcaataaatgcgcgatcgtgcagattctcgctgatgatgacgtacatcatcgcgtccatcagcgcattgtcggtggtgggcagcagcgggatccactgatccgccagcgaggaaacggtgtcggaatagcgcggatcgaccacgataaaccgcgtaccgttctgcttcatcttctgcaagaaatagttggtatgaccaaaaatggtctccgtcgggttatggccccacagaatcaccagtttggtgtccaaaagcgtatccagcgaactgccgctggcggcaatgccgtaagtataaggcgtcgcggccgccgtattgcccatactcacagaatggtagctttcgagatagccgccggtcagattcagcaggcgacgcgccattttatcgccggaaaaggtgccgccggaaacggcggtgccaacatgaacatagcgcgaagccgggccatatttttcagtaatcgattttaaattatcggcgattaaggttgtcgcttcatcccaggaaattcgctcgaactttccttcaccgcgttttcctacacgcttcatgggatatttaagtctatcggggtgataaacaaatttacggtatgcgcgtccacgaacacaggcacgcatcaccggcatttgcgcatccagcgcattatccggtcgcgttgaaattcgcgtcacgataccgtcactaacatgcgcccgaatatcgcatttgcccccgcagtcaaaagtgctgcatgtctgaacgactttttccgcaggcctgttttcagtggccgtcacagcgcgcgcctgagcggtagctggcgaggagacaaacggtaacgcaataagcgcggagctggcctggataaagtggcggcgagaaatagcgggctgttcgccatttccctggctttttatatttttcatgatccgactcgtcaaataaaaacccattctcacgtttttaagtgttagatctcttgatatttatcaagctccctcattaagggtaattccggaaaaattaataattctcattaactttaaattaaatgaaattcataatttattctgaagagttgttaacgtattaattcaaaattaaccgcagcaacctgaccggactcatccattacgacaagttgataacgtccagcgatattgagtaataaagaaaggcgattattttcgccattaacaggttcgccatttaaaaaccaccagcgacgccctttaccgccggtagtcgagacgggcagcgtaacgttttcctggcctggcaattgcctgatcaccgcgccatccctcactcctgacagcattaacggcgcggcatcactgccctgtagcggcggacagtggtcggacgccgcgggcaagcgggcgctacgtctttccgcaggcggcagccacggctccagcggccgcggccagacgataaacgtatgcgcacacgcctgcggacagtcggcagcgacacgccgccccgtatcatccagccagaccgggaaacgaataccgttgatgtcttcctgctcaggtaacagcagcgtgggcggctggctgtcatcgagcagccatgtcgccagtcggcggcgacagttgctgtctccggcaggcagagtctgtccgcccggccagcaaatgacgccgcggcttaccgtctgcggacgcggatcttccggcaggcgtcccgtatgcgccagtaacagattattgacctggttaagcaatggcaccgcgctggcaaaaccaaattgccccaccacaggtgtgccgtcgggtctgcctgtccagatgccgatgatatagcgcgcgttaacgccaatagcccacgcatcgcgatagccgtagctggtgccggttttccacgccaacggcacaatgcgcggcagcgcgttatccggcaagggttgcgcttcatccgccataatccgccgaatgatccacgccgctcccggcgacattaatggtctttccgacagcggatcgtccggctgtaaccgtagtttcgccgctttcccatgacgagcgaacgcgctgtatgccgccgccatctcgtcaagccgcgcgcccgcgccgcccagaatcagcgaaagattgggcgccgcgccagcaggcaaatatagcggcaggccgacgttacgcagttttgccgcaaatcgtttcggcccataggcttcaagcacctgaacggcaggcagattcagcgagcgtaccagcgcgtcgctcatgctgaccgggccgtgaaatccgctgtcgaagtttcccgggcggtaatctccggtgcggcgcggaacgtcctgtaataatgatgcgggatggatcaagccgtcatccagcgccagaccgtacacaaagggtttgagtaccgatcccggcgatcggatcgccgttaccatgtcgacatgaccaaaacggctgtcgtcattaaggtctaccgatcctacccagccgcgcacgctcatatcggtatgatcgacgacgatcatcgccaatgaactgcgtgcaggcagccgccctttccatgcccgcgccagatcttccagttgccgctgcaacccggcgtccagcgtggtcacaattttgtcgctccggcttttactcaacatcattcgggcaaaaagcggcgccagttgcggcatttgacgcggcgccagccagaccggctcttcacgcgactcgcgtaccgtttcggcaggccagacgccctgcgccgccatccgatccagcactttatttcgtgccgcttcggctctcgcaggccagcggtcggggcgtaaccggctcggcgcctgcggcaatacggccagcagcgccgcgtcagcgtagctcaggcgcgcgggcggcttgccgaagtaggcccagcttgcagcgccaataccctgtagcgtgccgccgaacggcgcgcggttcaggtacagcgtcaggatatcgcgcttggacaaatgccattcaagctggagggcgcgccaaagctggcggattttaccgccgaacgtgcgcgaatgcgggtccagcagtctcgccacctgcatagtcagcgtactgccgccggaaataacgcgcccggcggtaagatcctgccatgccgcgcgcgcgacggagaaagggttaacgccagggtgccgccagaaccagcgatcttcgtaattgattaaggcctccaggtagcggggagagacctcttcaatcgtcaccggatagcgccagatccccccggcgtcggcaaagcgccacagcggcgtaccgtcatgggctaccacgacccgcgcaggatggacctcattgagcggcagcggccagagtttatccgctgcccataacgccaggaaaataaaaagcggcgcgcccgccagccacagccagcggccacgtttaccacgccaaccgttcatttaaggcgtcacaatcagcagcccctcgctcgcgccggttgcccgccactgaggcgcgtacatcgattccacctgcggttgcgcaagctggtacgtccccggcgttaccgcgcgcgccaggtagaccagcgtcacgggctggccctcattgacaacgacggcagccacaaaccgatcgtcgcggaattccatatactgaatatccgcctgctgcatctgattaagcagattttgcacttcgctaccgctctccggcaggctggcgctgctgtcagccagattctggttttccagctccagcccggccgggagcaggtccaccaccagcgcatccggcacattgcgatcggccactaccgttaaccagaccagcaccagttcgccgctacgcaacgaggacagcgatttacgctgaccatcggtccccagtatttgtcgttcaatctgcaaaacgttgctggcaggctcaggcgcagatgagggatagccgctgctatccagacgcagccatagcggctggctaccggtgttcgtcacctcaagggcggccagctggtcagcatccagattacgggtcagcgccttgtcgcccgacagcggctgcgcctctaacgaggtctgcgcctgccaggcgcccgcgctggcctgtcgcgaatgcgcggcgaggaacaaggcattgttctcctgggtagagagccagcgctgaccgaaggcctgctcagaaagcgagcttaatagcgcgttttgcgcgtccggtctgaggttgttctcttccagtaacgacaacatcagagcgttatcgcgcagagaactgccgtaatccgctatccattgccgttcgtcctgacgcggcgtattcagagccagcgtaatggcctcttcgccgcgtctggcatcacccatcgtgtttaacgcgatgcccaattgcatcagcggcagtcctgaagccgcctgactacggcgctcccagatttcgcgcagcgcgccgagcggcgctttctgctgacgcgccagtaccagcgcggcgtaagcctgagcggcaaaagtactggcctgggtattatcgctataacgaatcagcatcgtaccgggatcctgcagatagcgcagcagtcgctcattgccccggttaatggcctccggcgggacgctatatccctgctcgcccgcgcgaatgaggaaatccatcgcgtaggccgttagccagggctcttccgccccattttcatcccatagcgcaaaaccgccgttatcacgctgcatctgtagtatgcgggagatgccgatatccaccgcggcgcgccgtttttcatcgctatcgccggtaataccgagcgactgcaattgagcggcattggtatacagcgccgggaataacccgctggtggtttgttccaggcacccgtacggatatgctttcagctcgcgaatgtagcgcgccagattgagcggcggttttccgcttaacagcagttgtccctgtaacgtggctggcgagacgtttgccagatgctgctctggtacatgccagctctctcccggcgccagcgcaatgccgctatttaccgtttgggcaggccaggccggacgcacgccgatttgccactgcttatgctgcgcgccgagggtttctcccggcagattcagaccgctaatggtcgcctggatttcgccttcgccaaaaccttccagcgcacgtaccggaacgaataaggtggtgcgcacgcccggcgccaggttgaccggttgcggctgttgactaagcagttccagtaacccactggcggcgagcgcaatattcagcgtctgcgggcggtcggtcagattggtgacgtccagcaccagtcgcgaaacatcccctcccgccagaaaacgcggcatattcagctcggcaatcactggcgcggcgacaacgactttgctttcgccgcgaccaaaatcgtccgctgtccatgcctgcgccataacccgcagttcgccgttaaagtcgccaatcggcagcgttacgaccccttcgccctgctcattgagcgtgatcggctgcgcctgctgcgcgatgatattgacatggtttaccggcggttttccgccgcgcttaaggtcgtcgccatcgccgccaaaacgcaacgccgccagccgcccctgcccttcaatgacctggccgtaaatatcgtagatatccgcaccgtagcgtttttgaccgaagaacgcctgccacgggtccggcgtcgcgtaatcggtgatattcaatacgccgctatcgaccgcggagaccagcacgttgatctgttttggcatttcgccgtgtttaacgctggctttcaccctgacggtgagcggctgattcgggcgcattttagccgggctttccagcgccagatcgaggcggcggttttcatcccccagcggtaggtgtagtaaccccacggcgcgttttggcgtcgcggaacgagatttatcgccgggacgcaccaccagcgtactgagatagagatcgtggcgattccaggttttatccaccggaatcgtgagctccagaccttgtgccggcacatcgatcgcctgccaccacagcggaccgtcgctggactccaccatcgcataacctttaccagcgaccggcgcggcgatatgcaatttcatggtatcgcctggacgataactcgctttatccagtttgagggtgacgcgatccggacgcgccgcgccgctaccgtcgctgttatcctgccagctatagccggcccagaaacgaacgctgctgaccgtctcattcggcgctttgacctccagacggtacgcgccccattccaccgggaagctgacttttccggtttcatccgcgttcagatccagcgtctgctcgccctccaccagatctttttgatcaaactgcgactgccagccttcgctttccgaccagttccagtaatagtcgcgacgctcgcggatgagccgcacctgtaaaccggacaccgcttttttctcgccctgcgcgttggcgtaaacaatatcgaatgcggcgttgctgtcttcgtcgacaatcggttgattaacggtggtatccgtacggtagtcgtataccgctttggcggcgaactgtggacgaattcccggtaacgtatcggcaggccaaatcgcctgctctacgcgacgagtgaccggacgaccgccagactccagcaggctggcctgtagaattacctgcagcggcgaatgcgcttcttgccactggctggcagcactcacttcaccacgtccgcctttatccaacgtcagttgaacttcgtccaggctgcgcgaaagattctcttcagcaatattgccgaactggaagccaggcaacgccgcgacagcgtcgcgcagcggacgcaggaaaagttgcccttgcagggtattgccgttagcaggcgcgccatacaagtaatagccgacaacggagaatttcacctcatccgcaggcgccagcggcgttttttgcgccgtcaggttgagcgccatccgctccggcataaagtcttccacgtggaaatcccaactccgcagcaaattatcgccggtgttggcgcggacatgccacaagccggtcggcgcgttgatatccagcggataattcaaacggtatagcccgttttccgcctggctgacgacggtacgcatcacctgtccgtctggttttaccacttccagcttaacgggttgatcgggcagcgttttaccgtcgctatcgcgcagtaatccgttgaggataaccgtttcgcccgggcggtagagatcgcgcgggccgaacataaagaactgcttgctgtagccgggcgcgccagcgacattaaattccgacagatccagagccggaagcgtgagatcgagcagcgtggtctgctcctctttacgcgccagtaatagcgccgccgctttatcagcctccagttgcacatgtccctgcgcgtcgctcgtcgcctgcgccagcgtctgacctttatcattcagaagaacgatctcaattcccgactgcgccgcgccgttttccaggctttgcgtaaagatatccagccgattatggtaacggtgcgcggacacgccgatatcgctaagggtaaacaacgtagcggcattactatagttgtagtgtccagcctgattcattaccgccacatatacgcccgcctgttgcagcggcttaatatcgcttaatggcagcagcagtttctcacgcgtattgcgcgccggattaagatcaaaacgaccggtataaaccagatccgccattttcagcagatggtcggactcccagttagagagagaactacggtactcccactggctgacaaatgacgccagcgatccgggcttaacgcggaaaaagttcacatcaacgtggttgacgttaagcgccatgaccggcagtccttccgctattttccccggtagcagcgatccccggctggcaaagccgacgctgggctggacatcacgcgtggtaatcgttttttcataagacttgccgaaggtggcgttattcagcgccttaacggcgggatcaaccgtgaccaccagcacgcgttcaggttccagatgacgtaaccttagctcttttaaatttggcgccagctcccatgcgccgtcaacgctgccgcttttcttatcaaccacgtgaaccacacgggagaaatcctgttcaggatctaaaggaattgaaaacgtcagcaccagcgtcgccgcgccgtcaagctgcgcttcggaggcgtctaatagcgtgagcgctttgccctggctttgctgcgccagcttttgtagctgtgccgggtcttgcgcgggcgagggctgcgctacggctggcgcttcgcttttagtcgtcggggcggttttatcgttgttatcgcatcccgccagcgccagcatgatcatgcaggccaccacgcgtaaatgtttcatctttcatccctggccttaacggcctgtcagcaacggttgatgagatattatgcgcgagaaattttattgtgtaagtccgtattactgtgatgatgcgaaaattttacgcagaaatgtggtttcgccagccaaaacagcctcttctacttgtcccttttcgggaaacgtccgacaatttgaccataatcaggtaacaatggagatgcccatgaccaccgccttttttgtcgccgccgactggcttgccgaacatattgatgatccggaaatacagattcttgacgcccgtatggcgccgccaggacaggaacatcgtgatatggcgggcgaatatcgcgccggacatattcccggcgcgctgttttttgatattgaagcgctttccgatcgcgcatcgccgctgccgcatatgatgccgcgcccggaagcgtttgcggtggccatgcgtgaactgggtgttcgccaggataaacacctggtcatatacgatgaaggcaatctgttctccgctccgcgggcatggtggatgctgcgcacgttcggtgccgagaaagtgtccattctggcgggcggactggcgggctggcagcgcgacgaatggctattgcgcgaaggcgaagaagcgcatgaaggaggcgagtttgaggcgaaattcgcgccgcaagccgtggtgcgtctcaccgacgtattgctggcaagccatgaaaaaaccgcgcaaatcgttgacgcgcgtccggcggcgcgttttaacgctcaggctgatgaaccgcgtccgggactgaggcgcggacacattcctggcgcgctaaacgtcccgtggacggaactggtgtatgagggcgaattaaagaccactgacgaactgaatgaggtttttttcagccacggcgtgagtttcgacagaccgattatcgccagctgcggttccggtgtgacggccgcggtcgtggtgctggcgctcgccacgctggatgtgcctgacgtcacgctttacgatggcgcgtggagcgaatggggcgcgcgtaccgatttaccggttgaacccgcttaatatctgccatgccggatggcgctcacgcttatccggcctaccgttcaggctgatgtaaaacgatctacagacattgtttttattcagctcttttccactgtcctgcaaacgggcattattttctcttaataaaatcctattttttatcggtaaatactttacgccgggtataaggagtatcatcaccgctgttttggttttcaccgggaaataactcctgtaaatataatttttaaggatggaaaatggatatttcacgcgctaatttaattgagttagttaaaaaggttaatcgcaataaggtgcctaatcctatgcctgccgaggaaataagtcgtctgcgagtgcgtaagtatcgcgatccgcaaaatacggaaaccactgagttacctgaaagcctgaaggcgctactggcctacgaccgcgatctacttagcaattataatatgcctgtgattgaaacattacaaagatctattgataaagagggagtaattcattcttactcccctgatgaagaggcgtattacggcgctggcatggatagctcaggtattgatattgaagatctgatgcctgtctggagtaacgatccccgtcttccggcattaattcgtatcgatcatgtcggcgatcaggccatttttatctatatcacagaacgggatgccaacggcgaataccctattgcccgcatggaacgaaatgaattctggctggcggagtcttctctggtggaatatctctataatattatttcgggcgctaaagacattggctttaccgaagaggatttacatctttcgcaatggaaggcacagcaaaaaatgaatgaaaaacgcgatgccgctttacttgacctggaggattatcatgaggcgttttgggcaaaactggacgcgctcgtcgattaatcgacatgctgtcgggtggcgctcacgcttatccggcctaccgttcaggctgatttaaaacgaatctacataaattcggtttaagcaggtcacaaaaaaaccgctcaattgagcggtttttttgtgctggtccggttcgcggcctttccagcaggctttgttgccatagcaacgcaggcacaccgtaggggattaatactcccttttaagggagcaaatgtcaatataatttatcaggaaactattcaacatttgaggtattatctttcccggccctttccgccgtctcgcaaacgggcgctggcttcaggagaggataacccatggccgtaagcgcaggcacaccgtagtgcctgctatcacggcattatcgccagcggtgctgccgtgatgcggtcttcgcaaggaccgcaacatgaaggtacgatgcttttgtgtcgtgcttcttgtttctggcacgttgtgtcttcacgcagacagaagctacccaggtagctctgttcccgtaacgctcaacgtccagagcaggtaagccaggaggccgccctgttgggcggctttcttttcttcagatgatgcggttctgtttaaaatcgcgcaggaacccgccccagcggcgctcgtagaacggcgcgatatgctcagtgataaagtggctgataccctgctcgcccttcctcacctgacaaatatcgatcggttcgtcacccggtaacgtgtcggtcgccacattgcccgctgcgtgaatgatctcttcaatttcgccgtcagcctcaatgccaatcagcagattgggttgggcgtccgcatgttctttaatcgcgcagagaaatgcgcgtttcaccggtttgatggttttaaacagcgtagtgagggaatcaatcatctgcgacggcggctcggccacttcggataaaataagcgactcgccgccttccagcacttcctgcgtacttaacggactgccttcctcagcgagaagcaggctgatttcacgcggcataaactctttgccggtcggcaatttagcgttgaggaatagcgtttcgccaagcgtcatttcaaacagcgtgcgcgccggcatcaccacaaatgcctgttcgtcttccacggcctgctgcagcgcctccagagaagtaaagaagggaatgacggtcgtgccgtcttctttttcccagtgctgcaaatccagagcgctgtcttccactatcgcctcgccttcggcagcgcttcccggcacccagacggtggactccagtaaggtacggaaaaatgccggacgatgcgcgggctcagtcgccgctttctccagcaagatttctaattcatttttagtttcggacataggaatcacaaattatgtatatgggttgtaggcctgataagacgcacggcgtcgccatcaggcaaaatgccgggtggcgcttcgcttacccggcctacaaaaacaccgctcaggcggtcagcaaattcgcgatggtgcgcacacccagaccggttgccccggcagcccactgctcaaccggcgctttgcgataagtggcggaacagtcaatgtgcagccagccttcgcggtaattttcaacaaagtgcgacagaaaacccgcggcggtgcttgccccagcgggatacgccgcgctgccggtgttgttcagttccgcaaagttagacggcagctggttacggtggaactccgccagcggcagacgccagaacggttcattctcttgcgccgcgctggtcagcaagcgccccgccagcgtatcgtcaaaactgaatagcgcatgatagtcgttacccagcgccgttttcgccgcgccggttaacgtcgccatatcaatgattagctccgggtgttgcgcgctggcgtcaatcaggccatccgccagtaccagtcgcccttccgcatcggtattcatgacttcgacattcttaccattacggtagcgaataatatcgcccagtttaaacgcattgccgctgatcagattatcggcgcagcacaggaacagttttacgcgtttattcaacccacgggtaatggcgaacgccagcgcgcccgttactgtcgccgcgccgcccatatcggatttcattgagtccataaaagcgctttgtttgatactgtagccgccggagtcaaaggtgatacctttaccgaccaggcaggcataaaccggcgcatctttgtctcccgtcgggttgtaatccagcgccagcagcaccggcggacgctcagaaccacggcctacggtatgcaaccccatatagttctgctcgcgcagatcttcgcctttggtgatacggtaagtgacgctatcgcacgcgacgctgcacagcagatccaccgcgcgctgcgccagttgctccggtccaagctcttccgccggagcattaatggtgtcgcgcacccagtcaataatggtcaggcggttatccagctcctgacgttgggcatcgtctaaatccggccacattacggtacggacgccttttggtcctttataacccgcccagaatgcccaacaacgctcgatatcccatccttcgcctgtcagcgcgacctgttttattcccaggccgtcgattttacgcgccgcacgctggatcaaccccagatcgtctttaccgttaagatgcaaggtaataccgtcgttattaatactgtaagtggctttatcgccccagcgcgcatcggcaggctgcgtggaaagcgtaattttcatggcttctgtcattgttattttccttattagcaaacgggccgccgtagggcagcccgttagatcttttgctaaatgattcgcgttgcaggaaggcggcaagtgagcgaatccccgggagcatagcaaactatgtgactggggtgagcgaacgtagccaacgcacctgcggcgaggatcatgacgcaaaaattactctgcttcatccaaccagactagcagaatcgcctccagaattttttcattggatgcgttagggtcgtcgtcaaaatcgtccagttcgcagatccactgatgcagatcggtgaaacgaacggttttaggatcgacatcaggatatgcgtcgtataacgcttcgccgatctcgcggctatcggtccacttgagtcccatactaccctctgttaatgctcacgcgcatggttgattgtgtaacgtggaatttcgataaccagatcgtcgtcggtaacgcgggcctggcagctcagtcgactttccggctccagcccccacgctttatccagcatatcgtcttcttcttccgaactttccggcaaggagtcgaagccttcacgtacaatacagtgacaggtggtgcaggcgcacgatttctcacaggcgtgttcaatctcgatgccgttgcgcagcgcaacgtcaagaatggtttcaccggtctcagcttccagaactgcgccatccggacaaagatcctgatgaggcagaataacaatcttcggcatgttaaacctcgtctacggaatggcctttcaacgcgcgacgaaccgactggtccatgcggcgagcggcaaattcctgggtttgtttatctacgtttttaatggcttgttctatggcgtcaacatcatcgccttgtgcgaccgcgcttaaatgtgcggcggcatcatcaatgcattgacgttctgcggcgcttaacagcgcggcgtcggcagttagcgcgccggtcaaactttccagcacgcgcgcggcttcgactttttgctccgccagcatacgcgctttcacgtcctgctcggcaaaactcatggaatccttgatcatcgaggcgatttcgccatcggtcaggccataggaaggtttgacctgaatggaggcctcgacgccggtggatttttccattgcggtgacgctcaacaggccatcggcgtctacctggaaggtcacgcgaatatgcgccccgcccgccggcagcggcggaatcccgcgcagcgcaaagcgcgccagcgagcggcagtcctgcaccagttcgcgttcgccctgcatcacatggatagacatcgcggtctggccgtctttgaaggtggtgaaatcctgcgcgcgcgccaccgggatagtggtgttgcgcggaatgactttttccaccaggccgcccatcgtttccagcccaagagagagtggaatcacgtccaacagcaacatttcgctgtccggcttgttgccgaccagaatatcggcctgaatcgctgcgccgatagcgaccactttatccgggtcaatagcggttaacggcgtgcggccaaaaaattcgcccacccgctcacgcaccagcggtacacgggtcgaaccgccgaccatgaccacttccagaacgtcctggggatcaacgccggcatctttcaatgcgcgacggcaggccaatagcgtgcgcttaaccagcgcggaaatgagatcgttaaactgctcgcgagtgatctccccctgccagcccgcaacgttaactcgaacagtatcggcatcgcttaaggcgattttcgcggcaatcgcggcatccagcaattcgcgctgaacgcgattgtcgctacgatcggcaattcccgcctgctcgcgaatatagtccgccagcagatggtcaaagtcgtcgccgccgagcgcagaatcaccgcccgtcgccagcacttcaaacaccccgcggctcaggcgtaagatagagatatcgaaggtaccgccgccgagatcgtaaacagcaataacgccttctttgcctgagtccagaccgtaggcaatcgccgccgccgtcggttcgttgagcaggcgcagtacatgcaggcctgccagccgcgcggcgtctttcgttccctgacgttgggcatcatcgaaataggcgggaacggtaatcaccacaccatccagctcgccggagagcgattcgctagcccgcgcggccagagctttgagaatatcagccgatacgcgtaccggattgagcaatccagccgccgtgtcaatcatcggcagtccattaacgcttgccttaaaccggtaaggcagatgcggatagcgcgcctggatatccgccagcgagcgtcccatcatgcgtttcacagagctgatagtgttggccgtatcctgcgcggcattgtcgcgcgcagcgtaaccgaccgtatggccctgctgctgatagtgaaccactgaaggcaacaggtggcgcccttcgtggtcaggcagagtttccgcctggccgctgcgaaccgtcgcaaccagagagttggtagtgcctaagtcgatgcccgccgccagacgacgctgatgcggcgcggcgctcagaccaggctcactaatttgtaataaggccatgttagattccagttaaaaatcgagcagcttttcttcgagttgttctgcgctgcttcgcagtttatcgagaaaccgcagtttgcgcaccgtatccgccgccgcgtcccacgcggcgttgtccaactgttccaccatttgctgaaggcgagcatcaaacatcttttgtacgcgtttgatgaagctttccagccgcacgtcgtcttttgattgttcgatatcgtccagctcttcgcgaagcgtgagttgttccatcagaaacgcggtgtcgcgtaccgtatgttgctcgctggccagatcgaacccgtgtaaggagagcagatactccgcgcgcgtcaaagggtgacgcagcgtttgccaggcctggttgatcgtggcggattgctggacggcggcaagctgctgcgcctgagtgccgttggcaaatttgtcagggtgatactggcgttgcagatcctgaaaacgaaggctcagcgcctgggtgtcaatctgataacgggctggtaagccaaagagggtgaagtaatccataacattctcagggatagcctgtcagaacaaaccccacacgcaggcgaccacggtggggttataccttcttacttcgcgccgcagatgcgttgtctgcgcgggttcccccagtcatttactcaagtaagcgcctggagattcactcgcttgccgcttttctacagcacgaatgctcggtataacagcggaacacggttacacgtggaagctttcgccgcaaccacactcatctttcacattcgggttggagaatttaaacccttcgttcagaccttcttttacgaagtccagctgtgtaccgtccagaaattgcaggctcttgccgtcaaccactaccttaacgcctttgtcttcaaacacggtgtcttccgccgttggctcgtcaacaaattccagtacataagccatacctgagcagccggaggttctcacgcccagacgcagaccaaaccctttaccacggttggccaggaaggtattaactcgcgctgctgcactgtcgctaagtgtaatcgacataacaaaacctcaatgttaacgttctattttatttcgcttcgcgtttgcttttgtaatccgcaatagcggctttaatcgcgtcttccgccagaatagagcagtgaattttcaccggcggcagttccagttcgtctgcaatgtcggtgtttttaatcgcctgcgcttcgtccagggatttccctttcacccactccgttaccagagaactggaggcgatagcggaaccgcagccgtaagtcttgaagcgcgcgtcttcaatgataccttcatcgttaactttaatctgcaacttcatgacgtcgccgcaggccggcgcgccaaccatgccgcttcccacgttatcgtcgttgttgtcaaacgaccctacgttacgcgggttctcatagtgatcgattactttttcgctgtaagccattataaattctcctgattccgataccgattaatgatgtgcccattcgatgctgttcagatccacaccctgcttgtacatttcccacagtggagaaaggtcacgcagacggccaatggatttacgaaccagatcaatggtgtagtcgatctcttcttcagtggtaaaacgacctaaagagaaacggatagagctatgcgccagctcgtcattcatgcccaacgcgcgcagcacgtaagacggttccagactggcggaggtgcaggcggaaccggaagagaccgccaggtctttcagcgccatgatcagcgactcgccttcaacgtagttaaagctcacgttgagaatgtttggcgcgccctgctcaaggtcgccgttcaggtaaacttcttcaatatctttgatgccgttccacagacggttacgcagaccgcgcagacgggccatttcggtctccatctcttctttcgcgatacggtaagcttcgcccatgccgacgatctggtggacaggcagagtaccagagcgcataccgcgttcgtgcccgccgccatgcatctgcgcttcaatgcgaatacgcggcttacgacgcacatacagcgcgccaatgcctttcggaccataaattttatgaccggagaaggacatcagatccactttcagttggctcaggtcgataggcagtttgcccacgctctgggtggcgtcaacgtggtagatgataccgcgcgcgcggcacatttcgccgatggtcgcgatatcctgcaccacgccgatttcgttgttcacgtgcatgatggaaaccagaatggtgtcgtcacgcatcgctgcttcgagctcgttgagatcgatgatgccgttgcgctgcggcgccaggtaggttacttcaaacccctcgcgctcaagctgacggcaggtgtccagcaccgctttgtgctcggtcttgctggtgatgatgtgcttgccttttttctgataaaagttggcagcgcctttaatcgccaggttatcagactccgtcgcccctgaggtaaagacgatttcacgcgggtcggcgccgaccagttcagcaatctggttgcgggcgatatcgacggcttcttcagcctgccagccgaaacggtgtgaacgagacgccgggttcccaaaggttccgtccagggtcagaaactgcatcattttctcggcaacacgcgggtccaccggcgtggttgcggagtagtcgagataaatcggtaatttcattgctcttaaactccgtatatcactcaatgcaaggaatcaggcaaccggctggatgtacgaccgtgttgacgggacgtccgcgtcccggcctgattctgaattcttttttacgcttcatccttcagacgaccgcggcattcaccgcatgaggccgccagaagagatggcgtaatattttaattaagcgcgtaatttaacgtcgatagcgtcctgcgcacgaccactggcgcgcggcgcgtcatgcgtgtgctggcgaccagacacatccagaacttcctggttattcaccagctcgcctaaggtaatattgttgagaaaaccggtcaggcgatcgcttaaatcacgccacagcgcatgggtcaggcatttatcgccgccctggcagccgcctttgccctggcaacgggtcgcgtcaacggattcatcaaccgcgctgatcacttcgccgaccgcaatgctgccagcatctttacccagcagataaccgccgcccggcccgcgtacgctggaaaccagaccgtttttacgtaaacgggaaaatagctgttccagataagaaagggaaatcccctgacgttcagaaatatcagccaacggtaccgggcccgcttcggagttgagcgcaacgtctaacattgcggtcacggcataacgccctttagatgtcagtctcatgtcttacttaacctcaaactcgcccctgcccggggttttttattgtaaaatgggggtattgcatagcagggacaagtctgacattcccgagtaatttggtcaactatttacttgagtaaattagtcaggtatttagcgttccgtgcgatattgatgcggttacttgcctttattctgctgctcaatagacgccagaatcccacgcagaatattcaactcctggctttccggtcgggcgcgggtaaacagacggcgcaatttattcatcacctgccccggatggttttcgcgaataaagccagtggagagcaacgtctgctccagatggccgtagaaacgttcaagatcgtccaccagcggatacggcgtctcttcatgatctgctgcgtcgccgttttcctgcgtcgccagccaggccatgcggacttcatacgcgatgacctgtaccgccatcgccagattcaacgagctgtactccgggttagcggcaatagcgacgtgataatggcatttttgcaactcatcgttagtcagcccgacacgctcacgaccaaaaaccagcgcaaccggcgtatttgccgcttccgccacgctttttaagccgcactcgcgcggatcaagcatcggccacggcaaagtgcgggaacgggcgctggtgccgaccaccaggctacagccagccaacgcttcatccagcgtatcgacgatctgcgcattaccgatcacatcgctggcgcctgccgccagggcgatggcctgggagtccggtttcaccaacgggtttaccagccacaggttagttaagcccatggttttcatagcgcgagccacggagcccatattgccggtgtgggaggtttccaccagcacaattcgaatgttttgcagcattgtctttcttcagctaaagattattctgacatcttaccataaaaccaagacagattccgatctcgctgctatactctgcgccgttttcccgttctttaacatccagtgagagagaccgatgcatccgatgctgaccatcgccgtgcgcgcagcgcgcaaggcgggtaatgtaattgccaaaaactatgaaactccggacgctgtagaagcgagccaaaaaggcagtaacgattttgtgaccaatgtagataaggccgctgaagcggtgattatcgacaccattcgcaaatcttacccgcaacacactattatcaccgaagaaagcggtgagcacgttggcacagatcaggatgttcaatgggttatcgatccgctggatggcaccaccaacttcatcaaacgtctgccacacttctctgtttccattgctgtacgcattaaaggccgtactgaagtggctgtcgtttacgatccgatgcgtaacgaactgttcaccgccacccgcggtcagggcgcacagctgaacggctaccgtctgcgcggcagtaccgcgcgcgatctggacggcactatcctcgctactggcttcccgttcaaagccaaacaatacgcgaccacctacattaatattatcggcaagctgttcagcgaatgcgccgatttccgccgcaccggttccgccgcgctggatctggcctatgtggctgcaggtcgtgtcgatggtttctttgaaattggccttcgtccgtgggatttcgccgcgggcgaactgctggttcgtgaagcgggcggtatcgtcagcgatttcaccggaggtcataactacatgatgaccggtaatatcgtggcggggaatccgcgcgtcgttaaagccatgctggcgaatatgcgcgacgaactgagcgatgcgctgaagcgctaagtctcttcggcggatggggccactcatccgccgtgccttttcaggcgtttttcctaaacacagcctcatcgctttacttgcctgcatgtttttgtacgatcgctccctgttccgctattggcataaagcggcaaggaagcgaacatgacccttcaacatacccgacgcatcgtcaaatccctttttattctgtttatcattgtggtctgtatttatctgctaccccgcgtagcgatcaatgccttttattacccggacaataaagtctatgggccaacccctgccgaagctgaatccattacctttaccgccaaagatggcacgcatctgcacggctggtttattcccactgctttcggcaggccggaaaacgccgtcgcgacggtgattcatgtccatggcaacgccggaaatatgtcggcgcactggccgttagtcagttggctgccagaacgcaacgtaaacctgtttatgtttgattaccgtggttttggcgaatcggagggtaccccatcacaagaggggctactggacgatacgaaaagcgcgatagattatgtgcggcatcgcgccgacgttaaccccgagcgcctggtactgctggggcagagcctgggcggcaataatgtactggccgccgtaggccactgcgtaggctgcgcaaatatgcgctacgccgaccaggcgggcatacgtgcgattatccttgactcaacgtttttatcctattcctccatcgccaaccagatgatcccgggcagcggctatttgcttgatgaccgctatagcgcggatcgcaatattgccagcgtcagccccattccggtattgattcttcatggcacggcagaccatgttattccctggcaggacagtgagaaattgtatgccctcgcccgggagcccaaacaaaaaatcttcattcctgacggcgatcacattgatgctttttccggacgttatgcaaacctttaccgtgatgcaatgattaaatttattcagacagcgctatccgctaaatagcgcgacgctgtatatatgcatattttatgattaagaatatatttattataccgatagtaaaaaccattttttcccgttagcgaaggcgatggattagcgctagcgtaacagtaatattcaactgatttttataacaatttattttcatttgtttttcctgaatattactgtggagtatgtgatggctatcaaaattacgcctgacgagtttagtttgcttatccagcgattaaacaaaaaatggcgcgtgtttgccccgtccgcagagtttcgcggcggacgtttttccgacactgacaacattatttatcaacggattagcggctggcgcgatctcatctggcacgagaaatcgcacatgtcgccgaataccattatcgcccctatcaccgaaacgctcttttatttcgataaagacaccattcaaattgccgagacagacatttccccgataatcatctttgcccgcgcctgcgacattaacgccatgtcgcggctggattatatgtatttatcaaatgggaataattccgattacagttatcaactgctacgggagcatattcgtttcgtccttattgagtgtgaagaaagcttcgaaaattgtttctgcgtctcaatgggtaccaataaaactgactgttatagcgccgccatgcgttttagcgatgagggcgcgcttgtcagcatccgcgatccctttatcgaggcggcgatacaagggctggggcaggaggctgactataccccctctttcgtcagcgaaaaccgggaaaccgtcgtcacgccggacagcgtttgccgcgatccgcaaaaaattcgcgacattctcacccgccacccgctatgggacgcctacgacagccgctgcatcagttgtggccgctgcactaccgggtgcccaacctgtacctgctatagcgtctttgacgtcgcctatgatgaaaatccgcagcgcggcgaacgccgtcgccagtgggcaagctgcatggtgccgggctttagcgacatggccggcggtcatggttttcgcgaaaaacccggcgagcgtctgcgctaccgcgccctgcataaggtcaatgactacaaagcgcgcaacggcattgaacatatgtgcgtcggctgcggccgctgcgacgatcgctgcccgcaatacatcaaattttctttgattatcaataaaatgaccgctgccgttcggcaggcgctggcagaggaggcataacgcatgtcacattgttcctgtcatgataaaccgcagcacagtttgctgcctgcggcgtaccgcatcctcagtattactcgccacacgccgctggagtggaatttccgcgtggccgtcgattttcccgcgcactgggggcaatttgttgaggtgtcgctgccgcgcgtcggcgaagcgcccatctccgtttccgactacggcgacggctggatagatctgctgattcgtaatgtcggaaaagtgaccagcgccctctttacgctgaaagaaggcgacaacgtgtggctacgcggctgctatggcaatggctatccggtcgatacgctgcgccataagcccttactggttgtcgcaggcggtacgggcgtcgcgccggtgaaaggcttaatgcgctatttcgttgagaatccccaggaaattggtcaactggatatgattctcggctataaaaatcgcgattgcgtgctgtacaaagaagaaatggcgacgtggcgcggcaaacataatctggtactcacgctggatgaaggcgaggctgatgaccgttaccagattggccgggtgaccgatcggcttgccgacatgacgcttagcgatatcgacactatgcaggccatcgtcgttgggccgccaataatgattacctttaccgtaaaaatgctgctgcaaaaagggctcaagccggagcaaatctgggtggactacgaacgccggatggcctgctccgtcgggaagtgcggccactgccgtatgggcgaagtgtatgtctgcaccgacggtccgatatttaactacgccgtcgcgcaacgttttgccgattaaggagaacatcatgagcattgatattgatatcattaaagcccgtgcgaaaaacgaatatcgcctgtcaaaagtgcgcggcgaagccatgatcagcgtccgcattcccggcggtattttgcccgcgcatttgctaacggtggcgcgtgacatcgccgaaacctggggcaacggacaaattcacctcactacccgccagaagctggcgatgccgggtatccgttacgaagatatcgacaacgtgaacgctgcgctggagccgtttcttcgcgagattgaaatagaactgtgcgacgtccaggttgaggataccaaagcgggctatctcgctattggcgggcgaaatattgtcgcctgtcaggggaaccgcatttgccagaaagccaacactgacacgaccggtctgtcccgtcgtcttgaaaaactggtctatcccagcccttatcatctcaaaacggtcatcgttggctgcccgaatgattgcgcgaaggcgtcaatggccgatctgggaattattggcgtggcgaaaatgcgcttcactgccgatcgctgtatcggctgcggcgcctgcgtgaaggcctgtagtcaccacgcggtaggctgcctggcgctgaagaacggcaaagcggtcaaagaagagtccgcctgtatcggctgcggcgagtgcgtgctggcctgtccgacgctggcctggcaacgtaagccggatcagctctggcaagtccgtctgggcggacgcaccagtaaaaagacgccgcgcgtcggcaagctcttcctcaactgggtgactgaagatgtgataaagcaggtgatcgttaacctgtatgaatttgaaaaagagatgctcggcggaaaaccgatctatctacatatgggccatctgatcgacaaaggcggctatctgcgttttaaagaacgggtactgcgcggcgttcagctcaatccggaagcgatggtcgccgaacgcatttactgggccgaagacgaatccgtcgcgcggatgcatctcaaacccgccggacactaatcaaccacgccatggccgcagcccgcccacaggctgcggcacgctaaaccacatgaccagcgccgcaacaagcagtatgccccctccggccagcgccagcgttgaccagcctacctgccgccataacgccggcgctttgtttccactgagtttcaccgccagatcacgaaaagtgtgtaccagcagcgccagcgaggtaatcgttagcgaggttcccgccgccatcgccagtaccgacgccattccccagctaaaaacgccaatcactttactgaataacagcaccattatcgcgccggaacagggccgcatccccatagacagtacgatcatgagtcgcgcgcgccagtcatcgccgctatgcaattgttcctgcgtcggtaaatgctgatgtccgcagccgcatttttcatggtgaacatggcgcggcgtaaaagcgataaagacaggtttacgtagcagcgcgcgtaacctttttatggcccgccagcacagcaaaatgcccagcccgccaactaacgcatagctccccttttccagccagaagccgctcagatggagctgcctggccggaagttgcaatacggtcagcacgcccaccaccaacccgatagccacgagcccctgtaataacgcggcggcgagggttaacacgatactcgatttcaacttcgaaggatgcgtcgccagccatgtcgcgatcaccactttgccgtgtcccggccccagcgcatgaagcacgccatacataaaactcagcagaagcaacgatccgcccgcccgctcaggatgcgtcgccaccgcattaagcagcgcgctcaactgctgatttacgtcccgctgccaaagagcgcttttcaacatcacctgcggccaggcctgccatatccacagaccgccaaccagcatcagcagcaggaataacgccaatggccacagcgagagccagcgtcgccccggagtgcgttgagaaaaaattactgacattgcaaggtcaccgtttgggcaaactgtttacctaaatccatatcctccggcggcgcgtcctctttatccagcgactgggcgaaacgtagcgtctcttcgccgggcgcaggagtataaacctgaatccgacacttttcgcgcagcggttccggcatcgtgatatcgctgtcctggtcataatgcatatcgacataataagagggatcaaacgttgaaaaggtataagtctgtccgcttaacggctgcggttcagccagcggtagcgtaaaggtcaataccgcctgatgcgcgtcacgcgtcataccgtattctgtcggcctgtttttaaacttcactttcgcgccattgcgccacacttctgtaaagtagtgctgcccaagtacgttagccatcacttccgccgccaactttttccatatttctgaccccggtgccgcgtttccggcgtcatacagcagatctgcggacgtcagcgcgtccattgtccagcgcatttttaacgccacaaattgctcattttcactgaccacctgcgtttgcagacggatgaagctgtgcggatgcgccgccgccacgaaagataaaacggcaagaaatagtgttaaggcgctgcgtttcactggcttcatctgttcctcgcgataaaaattctgtgacactcctcagcattcctggcctaaaagcacgcttatcacatttttcacacgcaaactttagctatccttaccagacaaactaacgggagacctgacagatgatgccgacaattgccccaccatctgtactttccgctccccagcgccgctgtcaggtattgctgacgcttttccagccggagccaattgccacggtggaaatcttcagcgcgcttaatggcgttgatgatgatactgcccgtgaggatatcactgagacaagcctggagatccagcgctatcatcgccttgccatcacaacatgccagaacggttgctatcggatcgaaggtacagcactcgatcagcgcctttgccttttacactggctcaggcgcggcctgcgtttatgcccgaccttcgtcacgcaacagtttaccccggccttaaaaaacgcgctaaagcagcgcggtatcgcgcgtccgctgtatgacgatattaatctgcacgcgctcatcaatctgtgcgcccgccggttgcaaaaaccatttgaacatcgcgacgtgcagttcctgcgtctctttttacagtattgtctgctacaacaccatgccggcatcaccccggaattcaaccctgtgcagcagatttgggcgcagtcgtgcgcggaatatccactcgcccaggaaattggtcgtcactggcagcgccacgtgatgcaggccgcaccgctcaatgaagcgctgtttatggcgttactgttttcaatgattcgcctccccgacccgattcgcgacacgcatcaacgggcgcagcaactgcgactggaggtggcgcggctggtgctgcgctttcgagaaaaagggaacgtacgcttcagcgacgaacaagggcttaacgatcagctgtatgtccatctcgcccaggcgctgaaccgaagtttattcacgattggcatcgataatacgcttccggaagagttcaaccgtctttatccgcgtctggttcgcaccacacgtgaggcgctcgccgggtttgaagccgaatatggtatccacttttccgaggaagagacggggctggtggcagtgattttcggcgcctggctaatgcaggataacgatttgcatgagagacagatcgtattgttagcggataaaaatgatgcgctggagacgcatattgagcagcaactgcgtgaactgaccctgttgccgctgaatatcagacggctatcgctccaggcatttcaaaaagagggatgcccgcgcggcgtagcgctgattgttaccccttacgccacgccgctaccgctcttctcaccgccattaattcatgcggatcgcaccctcacagagcaccaacagcagcagatccgcaagatcctggaatcatgacgcggcaaccactttgggccgaaggaagatagcgggcaatgccaccagcgccataatccagaacacgccgccgcccagatgttgatacagaaaaccggcaaataccgtcataatcgcgatgctgccgcccatcgccacagcggaatagacggcctgcaaacgaatcacctcgcttccctgacgcgcagcgatatagcgcatggcggccagatggcaaacggtaaacgtgccacagtgcaggatttgtatcacaatcagccacggcaacgccgtactccagcccatcagtccccagcgtaccacgccgcacacagcggaaagcaacagcaagtcgcgggcgctaaaccggcgaaatagctttttactcagggcgaaaatgatcacttccgccaccacgcccaacgaccataaatagccgaccgccgatgctgaatagccagccccctgccagtagatggcgctaaaaccgtagtaggcggcgtgcgccccttgcagcaaacagacgcaggcgagaaaacgccaactttgtgccaccagcgtacgccaggcgggccagcctgcgctctcctgctgacggctttccccttgcggcggcacgctgggacgtaacaacatacccagcaacatcgaggcgacgccgagcgtcagtagcgccagaatcgcctggtaatcgtataaactcaccagcttaccggtcagcgccgaccctatcacgaaggcgatggacccccacagccgcacccgaccatagtccagggtaatttgcttttgccaggtattggccagcgcatcggtcagcggcaccagtggtgaaaagaagaggttaaacccaaccatcaccaccattagccacgcgacatgcgttcctgcccaaaatgccagcgcaaataccagcgtcagcaatgccagtacgcgcagcgcggagatcaaccgcgaaggatcgcttacgcgaggcgcaatgagcagactaccgagaaaacgcgcgaccagacccacgcccagcagaagaccgatggtttccggcgttagcccaagacctttgagccagacgctccagaagggcagaaaaataccgtaactaaagaagtaggtgaaataactgagcgccagccagcgcgtggaatgcaatgccatgattccctcccgtttggaggcgatagtctggcggtaaacggttgcgctggcaagggtaacataaggttaacaggcggagggagaagttcaaacggcaacgccgccggataatgacttccggcggcgtcacgttatggcgcataagtaatgcccgacagacgcagcgccatcgggccattctcacaacacaagcgcttacgcgtaaaccgggaagcgggcgcagatatccagcactttcgctttcacgcgttcaatggtggcttcatcattgatgttgtccagcacgtcacacatccagccagccagctctttcacttccgcttctttgaagccgcgacgagtgaccgccggagaaccgatacggataccggaagtcacgaacgggctcttaggatcgttcggcacgctgtttttgttcacggtgatgttagcgcggcccagcgcggcgtcagcttctttaccggtcaggtttttatccaccaggtccagcaggaacaggtggttctcagtgccgccagacaccactttgtagccgcggttcaggaacacttccaccatcgctttggcgtttttcgccacctgctgctggtaaactttgaactccggctccatcgcttctttcagtgccaccgctttacccgcgatcacgtgcatcagcgggccgccctgcgcgcttgggaagacggcggagttcagttttttgtacagctcttcatcgccgcctttcgccaggatcaggccgccgcgcggacccgccagggttttgtgggtggtggtggtgacaacgtgagcgtgcggaaccgggttcgggtaaacgcctgcggcaatcaggcccgccacgtgcgccatgtcgacaaacaggtatgcgccgatgctgtcagcgatttcacgcatttttgcccagtcaaccacgccggagtaggcagagaagccaccgataatcatcttcggcttgtgctctttggccagcttcgccatctcgtcatagtcaattttaccggactcatcgataccgtaaggtacgatgttgtacagtttaccggagaagttaaccggggagccgtgagtcaggtggccgccctgcgccaggttcatacccagaacggtatcgcccggctgcagcagcgcggtgtaaacagcgaagttagcctgagaaccggagtgcggctgcacgttagcgtagtcggcgccgaacagttctttcgcgcggtcgatagccagctgctctacgacatcaacgtattcgcaaccgccgtagtagcgcttgcccggatatccttcagcgtatttgttggtcagctgagacccctgcgcctgcatcacgcgcgggctggtgtagttttcggaggcgatcagttcgatgtgctcttcctgacgtactttttcctgctccatagcctgccacaattcggcatcataatcggcaatgttcatttcacgctttaacatccgcatctcctgactcagctaacaataaaatttgtgcctgaaaaggcagtccgtgggacttcggccaacagtataaccgaatcattcttcgataacaggtcttgacaaaggtttttacgcaaacgattacctatgcgtcagataagggtttcctgaacgagagcctgacgaatttcaacggatttcttttcagctttgtgatgcagatttttcacgttgttacctccataacgtaaagcagagaagatccatttacaatgcaagggtatttttataagatgcatttgatatacatcattagattttcacataaaggaagcacgtatgcttgacgcacaaaccatcgctacagtaaaggccaccattcccctgctggttgaaacaggaccgaaactgaccgcccacttctacgaccgtatgtttacgcataacccggagctcaaagaaatcttcaatatgagcaaccagcgtaacggcgatcagcgtgaagccctgtttaatgctatcgcggcctacgccagcaatatcgaaaatttaccggcgttgctgccggcggtagaaaaaatcgcgcagaagcacaccagcttccagattaagccggagcagtacaacatcgtcgggacgcatctgctggcgacgctggacgaaatgttcaacccgggccaggaagtgctggacgcgtggggcaaagcctatggcgtactggctaacgtctttattcatcgggaagccgagatttatcacgagaacgccagcaaagacggcggctgggaaggcacgcgccccttccgcatcgttgcgaaaaccccgcgtagcgcactgatcaccagctttgagtttgaaccggtcgacggcggtacggtggcggaataccgtcccgggcagtatctgggggtctggctgaagccggaaggttttgcgcatcaggagatccgccaatattcactgacccgtaaacccgatggcaaagggtaccgtattgccgtgaagcgtgaagacggcggccaggtatcaaactggttacaccatcacgccagcgtgggcgatgtggtgcatctggctgcgccggcaggtgacttctttatgaatgtcgccgctgatacccccgtttcgctgatttccgctggcgtcggccagacgccgatgttagcgatgctcgatacgctggcgaaagaacagcataccgcgcaggtgaactggttccacgcggcggagaacggcgacgtccatgcgtttgccgacgaagtgagcgagctgggccgtacactgccgcgtttcactgcccatacctggtaccgcgagccgactgaggccgatcgcgcccaacgcctcttcgacagcgaagggctgatggatttaagcaaactggaagctgcgatcagcgatccggcaatgcagttctatctttgcggcccggtaggttttatgcagtttgccgcaaaacaactggtttcacttggcgtgaatcacgaaaacattcattacgaatgcttcggcccgcataaagtgctgtaattgcaagaaatcctctgaaaaaaagggcgttatcgttaaggcgaacgcccgttttcctccccgttcccctgcttattgcgctgctttttatgcctttcttttacaaaaaaggggaataaaaaaagtctgtgcaaatcgtgttattattaacgtttgacttagctcgttagggcatctttttatgcagcaacctgttgtacgcattggagagtggctggttacaccttctgttaatcagatcagtcgtcagggacgccagattactcttgaaccacggctgatcgatcttctgatgtattttgcgcatcacccggatgaagtgttaagccgggataacattattgatcatgtctggatgcgcaccatcgtgaccaaccatgttgtcacccaaagcatttctgaactacgcaaatcattaagagatggcggagacagcaatgctgaatacatcgttaccgtacctaaacgcggctataagctgacggcgccggttatctggtgcgaagaaaatagcgatgagatcgataattcatcaacgtcgccgccgccgccgatcgcagcgacgaatgcagaaccgacagagggggttactgccgctacgcctgtgccgcccgcctctttgcaaacgccgactaaaaaggcgaaaaagccgcgtatcgccgctttctggacgtgggtgatgttcctgctctcgctggcgacgctggtggtgtttatcgtgatgtcggtggtagatcataatgccgcggtaacaaaaacgcggttattacttaacccacgagatatagatgttcgttttgaaggcggcaattcctgtaataactgggtctcgcaggagtcctacgctatcggtctgggcggcttaatcaccgacttgctgaacacctactcgacctttatggtacatgataaaaccaattaccgggtcaatgagccaagcagctccggtaagacgttaaccattcagtttgtcaatcagcgccactatcgggcgcagcagtgctttatgtctgtggtgctcattgataacgccgatggttcaaccatgctggataagcgttatttcgtcaccaatactaaccagttgtccatccaggatgatctgtttaatagcctgtctttcgttttaacacagccctggcctaatcgtatgcgagaacaactggccctgttcagaacgccgcaaaataccgcgctgatgcgtttttatgaggcgcgccagcttattctgagcggcgatgcgcaggcgctaggtaaagccagcgatattctgaatggcattattaaggaaacgcctgatttcaactatgcctatgaatataaagtgctggtagatgtattacggcaatcacaacagccgtttgataaagaacaagtggctgcgctgaacgaagagtttaaaaaaatagatcaaattccgggcgttgagaaaacgtctgtttattataaaatcaagaccgttgatcttttgggcaaaggtgatatcgatgcagcgtatgaggaaatcaataaaagcatcgagcttgaaatgtcgtggtttaactatgtcctgttggggaaagtttacgaaatgaaaggtgagaatcgtctggccgctgatgcctatctgaccgcctttaatttacgtccaggtgaaaacacgctgtactggatcgagaacggcgtatttcagacatccgttcagaaaattgtcccttatctgaatagttttctggcagaagattaaatttaacgctgaaccatgacaaataaaagcgaaaagatattaaatttttcgcttttattttgtgaagaacatgttgccaaaaatagcttatgttaattttggcaacatgttcatcgcaaagaaatgtaaatataactctttgtaattaaacgatgtttatcctttcatgatattttccatgatatttatatgttaattcaaaaaaatcaatctatcagttttttcatgtttgtgtttatttcactttttctttaggacttatctcaacccattcgttaatcttgtcgacagttgaacgggcacgcagcatatatgaagcataagcccggttcttaaaaatacagctcaggagaaatgaacatgagttctgtcaaaaagatcgggctatttgcctgtactggcgtcgttgccggtaatatgatggggagcgggattgcattattacccgccaaccttgccagtattggtggcattgccatctggggctgggtaatttctattattggggcaatgtcgctggcttatgtttatgcgaggctggcaaccaaaaaccctcaacagggtggccctatcgcttatgctggggaaatatctccggcgtttggtttccagaccggcgttctttattatcacgcaaactggattggtaacttagccatcggcattaccgctgtttcttatctttctacgttcttcccggcattaaataatccaataccggcaggtattgcctgtattgctatcgtctggctgttcacctttattaatatgctgggtggggcctgggtcagccgcttgacaacgattggcctattcctggtgctgatcccggtagtcttgaccgcagtcgccggctggcattggttcgatatcgcgacctatcacgcgaactggaacacgtccacgacgaccgactctcacgccattgttaaaagtattctgctctgcctgtgggcgttcgttggcgttgagtctgccgccgtcagcaccggcatggtgaaaaacccgaaacgcaccgtaccgctggcaaccatgctgggtaccgcgctggcaggcatcatctatatcgccgcgactcaggttatcgccgggatgttcccagcttccgttatggcctcttccggcgcgccgttcgctatcagtacctccacgattctgggtggctgggctgcgccgctggtttccgcctttaccgctttcgcctgcctgacgtctctgggctcctggatgatgctggtcggccaggctggggttcgcgccgccaacgacggcaacttcccgaaaatttacggtgaaatggataaaaacggtattccgaaaaaaggtctgctgttggctgcggtgaaaatgacggcgctgatgattctgatcaccatcatgaactccagcggcggtaaagcgtccgacctgttcggcgaactgaccgggattgccgtactgcttaccatgctgccgtacttctactcctgtgttgacctgattcgcttcgaagggttcaacatccgtaactcggtaagcctgatttgttctgtactgggctgcgcattttgcttcatcgcactgatgggcgccagctccttcgaactctccggcacctttatcgtcagtctgatcatcctgatgttctacggtcgcaaaatgcaccagcgccagaacaacgacagcgacaacaatacggctgaagcgctttaaccgctaactcctttttctcaaagcccctttcgtcacctgctatagcgtagcgggaggggcccactttaccaggaacaagactatgaacgttattgctatcatgaaccacatgggcgtctactttaaagaagagcctattcgtgaactgcatcgtgcactggaaggtttaaatttccgtatcgtctatccaaacgaccgagaagacctgctgaagctgattgaaaataactcccgcctttgcggcgtcattttcgactgggataaatataaccttgagctttgcgaagagattagcaagctgaacgagtatatgccgctgtacgccttcgccaacagctactctacgctggacgtcagcctcaacgatctgagaatgcaggttcgcttctttgaatatgctttaggcgccgcagccgatatcgcggcgaaaattcgccagaataccgatgaatacatcgacaatattctaccgccgctgacaaaagcgctgttcaaatatgtgcgcgaagggaaatatactttctgtacgcctggccacatgggcgggaccgctttccagaaaagccccgtcggcagcatcttttatgatttcttcggcccgaacacgatgaaatccgatatttcgatttccgtttctgaactgggttcgctgctggaccactccggcccgcataaagaagcggaagagtatatcgcccgcgtctttaacgccgaacgtagctacatggtgacgaacggcacctctacggcgaacaaaatcgtcggtatgtactccgcgccggcaggcagcacggtactgattgaccgtaactgccataaatcgctgacccatctgatgatgatgagcgacattacgccgatttatttccgcccaacccgtaacgcctacggtattcttggcggtattccgcaaagcgagttccagcacgccactatcgctaaacgggtaaaagagacgcctaacgcgacctggccggtccatgctgttattactaactcaacctatgacggtctgttgtataacactgactacatcaagaaaactctggatgtgaagtccattcattttgactccgcctgggtgccttataccaatttctcccctatttatcagggtaaatgcggtatgagcggcgaccgtgtagaaggcaaaatcatttatgaaacccagtccacgcataaactgctggcggcgttttcacaggcatccatgattcatgttaaaggcgacattaacgaagaaacctttaacgaagcctacatgatgcataccaccacttctccgcactacggtatcgtagcgtctactgaaaccgcagcggcgatgatgaaaggtaatgcgggtaaacgcctgattaacggctctattgaacgtgcgattaaattccgtaaagaaattaaacgcctgaaaagcgaatccgacggctggttctttgacgtatggcagccggaacatatcgatggagctgagtgctggccgctgcgttcagatagcgcatggcatggcttcaaaaatatcgataacgaacacatgtacctcgacccgatcaaagtcactatcctgacgccggggatgaagaaagacggtacgatggatgaattcggtattccggcaagtctggtcgccaaatatctcgatgaacgcggcatcatcgtagaaaaaaccggtccatacaacctgctgttcctgttcagcattggtatcgacaaaaccaaagctctgagcctgctgcgcgcgctcactgaatttaaacgcgcctttgacctgaacctgcgcgtcaaaaacattctgccggcactgtaccgcgaagcgcctgagttttatgaaaatatgcgcatccaggaactggcgcagaatattcataaactggtcgaacatcataatctgccggacttaatgtaccgtgcgtttgaagtgctgccgaaaatggtgatgacgccgtatactgcgttccagaaagagctgcatggcgaaacggaagaggtgtatcttgaagagatggttggacgcgtcaacgccaacatgatccttccttaccctccgggagtgccgctggtgatgcctggtgaaatgatcaccgaggaaagccgtccggtactggaattcctgcaaatgctgtgcgaaatcggcgcccactatccgggcttcgaaaccgatatccacggcgcctatcgtcaggcagacggacgttacaccgttaaagtgctgaaagaaaatacgaaataagtaccaaagggaagtggcttgccacttcccttttttcacgcagcaaggagactttatgaaaacaccctcacaaccgcgcgcgattttttacatcgtggcgattcaaatttgggaatacttcagcttttacggcatgcgtgccttactcatcctttatcttacccaccagcttggttttaatgacagccacgcgatcaacctcttcagcgcctacgcctctttagtttacgttacccctattcttggcggctggcttgccgaccgcctgcttggcaaccgcgtggcggttatcaccggcgccttattgatgacgctgggtcatgtggtattgggcttagaatctgattcaacgctgagtttatatgcggcgctggccattattatctgcggctacggcttgtttaaatccaatattagctgtctgctgggcgaactttacgcccctgatgacaaccgccgcgacgggggattctcgctgctctacgccgccgggaatattggatcgatagccgcgccgatcgcctgtggtctggcggcgcagtggtatggctggcatgtcggctttgcgctggcgggcgtgggaatgttcatcggcctgctcatctttttaagcggtcatcgccactttcagcagacgcgtggggttaatcgccccgcgctgcgggcggttaaattcgcccttccaacctggggttggctggtattaatgctgtgtatcgcgccggtattcttcaccctcctgctggaaaataactggtctggctatgtgctggccattgtctgcgtcttcgcggcgcaacttatcgcccgtattatggttaaatttcccgagcaccgtcgcgccttgtggcaaatcgttctgttaatgatcaccggcactctcttttgggttctggcgcagcagggcggaagttcgatcagtttattcatcgaccgttttgtcaaccgccactggctgaatatgaccgtccccaccgcattgttccagtcggtcaatgcgattgcggtgatggcggcgggcgtggtgctggcgtggctgagcagcccgaaagagagcgcccgctcggtgctgcgcgtctggcttaaatttgccgtggggctggtattaatgggcggcggttttatgctgctggcgctaaacgcgcatcaggcccggttagacgggcaggcatcaatgggaatgatgatcgcagggctggcactgatgggctttgcagagctgtttattgatccggtcgcgatggcgcaaattacccgcctcaacctgcctggcgtcacgggcgtgctgaccggtatttatatgctggcgaccggcgcggtcgctaactggctggctggcgtcgtcgcgcaacaaaccacggaatcgcaaattagtgatacggcggtagccgcctacggacactttttctcgcaaatgggcgagtggacgctaagttgcgtggcgctgatcgtcgccattgtcggcctgagatgggtttgcacccggactacatcggcgctaccgcagggcgattaaacggtggttcgctgcccacaaggaggggacgggcagcgaatcggcacatcagatagccgcgtcgtcttcttcgccagtacggatacgaataacgcgggcgacatcaaagacaaagatcttaccgtcgccgattttccccgtctgcgcggtacgaatgatggtgtcaacacaggtatccacgatgtcgtcaggcacaacgatctcaatttttaccttcggcagaaaatccaccatatattccgcgccgcgatacagctcggtgtggcctttttgacggccaaagcctttgacttcagtgaccgtcatcccggtaatacctacctcggccagcgcttcacggacatcgtccagcttgaagggtttaataatcgcatcaatctttttcatgctattccttgaaaaggtcgcctgtgttttgatcggttaaacgtaacatatttcgcgctactttacggcatgaaaactactctttgaaatcattcgcatccagttcgtggcgggagagtagcttatagaattccgtgcggttgcgccccgccatccttgccgcgtgcgtcacgttacctttggtaatttgcagtaacttgcgcagatagttcagttcaaattggtttcgcgcttcggcaaaagttggcaacgcggtgttttcgccttccagcgcctgctcgaccaacgcatcgctgatcaccggcgaagaggttaacgccacgcattgttcaatgacgttgaccagttggcgcacgttgcccggccaacttgccgtcatcagccgtttcattgcatcagtagaaaaggcgcgaacaaacggtttatgccgctgtgccgactgtctgagcagatgattagccagcagcggaatatcctcggtacgctccgccagcgccggaattttcaggctcacgacattcagccggtagtacaaatcttcacgaaattcgccccgcgccatcgccttcggcagatcgcggtgcgtcgcggaaataattcgcacgtcgatatcaatatcgcgattgctgcccagcggcctgactttacgctcctgtaacacccgcagcagcttcacctgtaacggcgcgggcatatcgccaatttcatccagaaacagcgtgccgccttccgccgcctggaacaacccttcacgattgctcactgcgccggtaaaggcgccgcgcgcatggccgaataattcggactccagcaactgttccggcaacgcgccgcagttgatggcgacaaacggcttgttactgcgcgggctggcattatgaatcgcctgtgcgaaaatctctttcccggtgccgctttgtccgttaatcaatacgctgacatccgactgcgcgaccatgcgcgcctgttcaagcagtcgcagcatcagcgggctacgggtaacgatagcgttgcgccagctatcgtccgtcgcgggagcggactgctccagcgcttcatctatcgctttatataacgcgtctctgtcgatcggcttcgtcaaaaagctgaatacgcctttctgggtagcggccaccgcatccggaatagaaccatgcgccgtcagaatgataaccggcattcccggctgtactttctgaatttctgtgaacagttgcataccatccatttcatccatgcgcaggtcgcttattaccagatccactttttcccgatgcagtacccgcagtccttcctggccgctctctgcggtcactacactgtatccttcactggtcaggcgcataccgagcaatttcagtaatccgggatcgtcatcgaccagcagcaggtgcgccggtttacggcttatcatggcgttacctcatcttgtgacggcgacggcgccgcgccatcttcagacgtcgcgggtttgtcattcgtatgcggcgtatcggcgttgtaattccctgccggttttcgtgtcgaaagctggcgctcaatatcggttaaactctccagcttacgggtggtaagatcgagctgcgtttgcaaggcctgttgctgctggcgcagcgcatcaagctcactatctgacgtttgctggagcttgctataacgctgacgttcggcagaaagtgctaattgcagcgcctgaccgtcatgccagatttggtagacgggccgtacctgagccggtatttgcgcgcttaacgcctccagacgggtcactatggcgcgccgctccggcggcgtaatttttgcatccgccagtaaaatcccgcgcctgaaggcattttgccagttatcatccgtcaacgcgcgcgcctctgcgcgcgactgaaccggcatcagacgatcggcgcagtcaatcgtgcgtagccagtacagcggattcgtctccaccgcctgcccgcgtagcgaccagatatccgcgcacgccgtcgggagataatccgccagttgataatgggggagcgtgtcctgcgctgcgctaccgggcagttgctgtgaagcatggggaacacatgcggtcagcgccagacacgatatgcccaccggtattccccaccgcaaaaggcatcgtttaatagtttggacgaaaacgtgtgacatacgcaccaggcttaaattcatattagtgtttgtcagatgcaggcagcggcagcgagatgcgaaaacagacttcctgcgctttgtcatccaccagttggatctctccctgcattcgacgaatacaatctctggcgatactcagccctagcccactgccttttaccgccccttttcgctggtggcttccctggaaaaaaggctcaaaaatcatttctctttcggtttgcggaatcggctcgccgctattaaccacatcgatataaaccgtggagccctgagagcgactacggatacaaatgttaccggattcagcgccatagtgcaccgcgttggaatagagattatccagcacgctcatcagcaacatgggctctgctatgcagcgttcggcctccaggtcgacatcggtatgcatcattttagcgcgggcaggcaaactgtgggcggaaaccaccatatccacaagcggcgcgatatcgaccgcttccagctctgtggcactgtctaccagtttccggttgtaatcaagcaattgctcaatcaatttttgtaaattacgactgctgtcatccagaatatcgaccacctctttttgctccggcgtcagcggcccaaccacctgatcggccagcagctctgtcccctcgcgcatactggccagcggggttttcagctcatgggacaagtgacgtagaaactgatggcgctgggattccagccacgccagacgctcactcagccagataatgcgctgccccaccgatcgtaattcacgcggaccggtaaaggtgacggtattccctaaagaacggccttcgcccaggcgattaatcatccgttcaattcctttcaccggcccgataatcatgcgggtaaaaagtagcaccatcgccaggctcaccagaaatagcaccagcgcctgccagccgaaaaattgtccgcgctcggcgatttcttgttgtaactgttgcccacgcgaataaaccacagtacgcgtcgcctgcaccatttccgtattcgcgttggcaaaggcctccagacgcgcggccgctgccgcttccgggccgctatctttacactgcaattgcgccagcgcgtttaaatcctggcgtaacgcctgatacaacttatcatccggcaagacgccggcatgggcgtccagcatatcgctatagcgcttacgctggctttgatacacttttgccagcgtcggatcgtcaagcacacaatactgtcggtagcttcgctccatctccagcgcgacgttggtcatcgcctcgctgcgccgggcgtcaataagcgtgctgcggttagtcaccgcagcctgatcgcttaacgcgttaaggctttgccacgcctgccaggccagaaccagcaacggcagcaggatcagcaaaaaggccagcatgaccaattgtcgtaaagaacgggggaaaacagaccagcgcttcaacgtgtcgctcacataaaagaagaataaaaaagatgctaaccgagggaagcgccagatacaacaaagccgggctaaacccggctttgttatggaataaggcggtgcctaactcgacgtttcgcccggaggttgataaagctacgctattatcagaagttggacggcaggcaccttgttgtgcgtcattcgaagtttatgtagcgcgtccctaaggggctgacataagaaggtgaatgagccactggttatcattatgcagtaattgtgccaatattcaaaagactttgttaacacaatgatagatatgaaaaatatcgttattcatgctaaaaatggctctgtctgttttttgccctttctgtcgccaatcagcaacacctgcaacacctaaaaataaaacaatttaaaatcaaatagttaaatgtctctttttggcgacaacctatcccccactcatgtcgggatttcccgacactttaatcttgcggcataagcactagtttattgccggatgacggcgtaaacgccttatccggcctaccgcttgacgttcaagacggtagcttcaaccgcgcttccccgtgggcctgataagcgccgtctacaaaaaatcccctcgtgaataggggcttaatggctatcgggctaattaaccaagctgcttacgcgcattacggaagatacgcatccacgggctatcctcgccccagttttccgggtgccaggagttggcgacggtgcggaatacgcgttccggatgcggcatcataatcgtcacccgaccgttttcggtcgtcaccgccgtgatgccgttcggcgaaccgttcgggttagccggataggtttcagtcaccttaccaaagttatcaacgtagcgcagagcgaccaggcctttgctctcaagcgcggcaagatgcgcatcgtcacgtacctcaacgcgcccttccccatgggaaaccgcaatcggcatctgtgagcctaccattccttgcagcagcagcgatgggctttgcgtcacttccaccaggctgaagcgggcttcgaagcggtcagaatggttacgtacaaaccgcggccacagttcgctgcccgggatcagctcgcgcagattcgacatcatctggcaaccgttgcacacgcccagcgccagtgtctgcggacgatggaagaaggtttcgaattcgtcgcgcacccgatggttaaacagaatggatttcgcccagccttcgcccgcccccagcacgtcgccgtaggaaaagccgccgcaagccaccagcgcatggaagttgcccagaccgatacgaccgcccagcaggtcgctcatatggacgtcaatcgcgtcaaagcccgcacgatggaacgccgccgccatctccacgtgagagttcaccccctgctcgcgcagtacagcgactttcggtcgtgcgcctgtcgcaatgtacggcgcggcgatatcttcattaatatcaaacgacagcttcacgttgaggcccggatcggcatcattcgctttcgcctcatgttcctgatcagcacattgcggattgtcgcgcagacgctgcatctgccaggtggtttccgcccaccagacacgcagcgtagtgcggctttcgctgaataccgtctggtcattagcggtaatcacaaagcgatcgccagccagggcctgaccaaggtagtggacgcagtcagcaagaccgtactgcgccaacagcgcttcgaccgcgtctctgtcttcagcgcgtacctgaatcacgccgcccagctcctcgttgaacagtgcggccagatggtcatcgcccagcgcggcgatatcgacctgcacgccgcagtggccggcaaaggccatctcggccagcgtcaccagcagaccgccgtcggaacggtcgtgccaggccagtaatttacgcgcagcgaccagcgcctgcatggcgtcatagaagcctttcagttgcgcgacgtcacgcacgtccgcgggtttgtcgccaagctgacgatagacctgcgccagcgccgttgcgcccagcgcgttgtggcccttgccaagatcgatcagcaacaaggcgttatcttccgttgacagctgcggcgtaagggtgtgacgcacgtcttccacgcgggcaaacgcggaaatcaccagcgacagcggcgaggtcatttcgcgctgttcgttgccttcctgccagcgggttttcatcgacatcgaatctttgcccaccggaatcgtcaggccaagctgcggacagagttcctctcccaccgctttaaccgcgtcatataaaccggcatcttcgccaggatgaccggctgccgccatccagttagcggaaagcttaatgcgcttgatatcgccaatctgcgtcgcggcaatgttagtcaacgcttcaccgacggccagacgggcggaggcggcaaagtccagcagcgccaccggcgcgcgctcgccaatcgacatcgcttcgccgtagtagctgtcgaggctggcggtagtgaccgcgcagtcagccaccgggacctgccacgggccaaccatctggtcacgcgccaccataccggtgacggtacggtcgccaatagtgacaaggaaggttttttccgccacggtcggcagatgcagaacacgatttaccgcgtcggcaatcgtgatatccgcgcggttcagcgcatcgcctttcgccttcaatgtttgcacatcgcgggtcattttcggcgttttgcccagcaggacatccagcggcaggtcgatcggctgattgtcgaaatggttatcatgcaacgagagatgctgttcttcggtagcatcgccaatgaccgcatacggcgcgcgttcgcgcttacacagttcgtcgaacagcggcaactggtcagccgcgaccgccagtacgtagcgctcctgggattcgttacaccagatttccagcgggctcatgcccggctcgtcgctaagaatgtcgcgcagttcgaatttcccgccgcgcccgccgtcgctcaccagctccggcatcgcattggagagaccgcccgcgcccacatcatggataaacaagattgggttagcgtcgcccaactgccagcagcggtcgatcacttcctggcagcggcgttccatttccgggttgtcgcgctgaacagaggcaaaatcgagatccgcatcagactggccggaagccattgacgatgccgcgccgccgccgaggccgatattcatcgccgggccgccaaggacgatcagcttcgcgcccacgacgatctcgcctttctgcacgtgatcggcgcgaatattaccgatcccgcccgccagcatgatcggcttatggtagccgcgcagctcttcgccgttgtggctgttcactttctcttcataagtacggaagtaaccggtcagcgccgggcgaccaaattcgttgttaaacgccgcgccgcccagcggaccttcggtcatgatatccagcgcggtgacaatacgttccggcttgccaaaatcctcttcccacggctgttcaaagcccggaatacgcaggttggaaacggagaagcctaccagcccggcttttggtttcgcgccacgcccggtggcgccttcatcacgaatttcgccgccggaaccggtcgccgcccccggccacggagagatggcggttgggtggttatgcgtttcgaccttcatcagaatgtgcgcgggctcctgatgaaaatcgtaacggccagtattgtggtcggcgaagtagcgccccaccgcagatccttccatcaccgcggcattgtctttataggcagagagcacatagtccggcgtggtttcgaaggtgtttttaatcattttaaacagcgacttcggctgcggtttaccgtcgataatccagtcggcgttaaaaatcttgtggcggcagtgctcggagttcgcctgggcgaacatgtacaattcgatatcgttcgggttgcgccccagtttggtaaacgcctcctgcaaatagtcgatttcatcttccgccagcgccagaccaagacgcaggttggcgtcaattaacgcctgacggccttctcccagcagatcgacactggaaaccggcgcaggctgatggtggataaacagtttttccgcatcggttaaagaagagaacaccgtctccatcatacggtcgtgcagctctgcggccacttgtcgccactgttccgccgtcaacgtcgaagcctcgatatagtacgctacgccgcgctccagccgatcaacctgttgcaggccgcagttgtgggcgatatccgttgcttttgaagaccagggggagatggtaccaggacgcggtgtgaccaacaggagtttacccgccggcgtatggctgttaagcgccgggccgtattgcaacagacgggtaagctgcgcctgctcgctatcatttaacggggcgttcaggtcagcaaaatggacatactcagcgtatatattgtggacctggaggttggcagcctgaaagcgcgccagcagtttattgatacggaatgcagacagtgcaggcgaaccacgcagaatttccatcataagtctctcgtcttctaagctttggtgtgcgcaaggggggaaacggccgtcattataaagaatctgacgcgccgacgaaaccgtttgcgtagaaataaaatcaccgctttttcttgtcatacggtgcggctatcgttgcgaataagttgccaactggcgcattgttacgcaaaatgccgctcattaatgacttatctattgcagcaaaacatctttttcagcccgaggcaacgcacgatccagagaattaactaattgaaaaaattaaagattaattatctgttcatcggcatattgacgctgctgctggcagcagccctttggccctcaatcccctggttcggtaaaaccgaaaaccatatcgccgcgattcaagcccgggggatactgcgcgtcagtacgatcgactcgccattaacctattccgttatcaacggtaaaaaatatggtctggactatgaactggcgcagcagttcgccaactatctcggcgtgaagctgaaagtgacggtgcgccagaatatcagccagttgtttgacgatctggataacggcaatgccgacctgctcgcggcagggctggtctacgacagcgcacgcgttaaaaactatcagcccggtcccatgtattactcggtttcgcaacagctcgtctaccgggtcggacaatatcgcccacgttcgctggcgaccgttaacgagaatcagcttaccattgcgccagggcacgtcgtggtcaatgacttacagcgtttaaaagagacaaagtttcccgacctgagctggaaagtggatgataaaaaaggctcgacgacgctgctggaagaggtcatcagcggcaaactggattacaccattgccgattcagtggcgatcagtctgtttcagcgcgttcatcccgagctggccgtggcgctggatgtcacggatgaacagcccgtgacctggtttagccgactggacgacgataatacgctctccgccgcgctgctcgattttttcaattcgatcaatgaagacgggtcgttggcgcggatcgaagagaaatatctgggacatggcgatgatttcgactacgttgatacccgctctttcctgcgagcggtagataacgtcctgccggagctggaaccgttatttaaaaaatatgccaaagagatagactggcgcctgctggcggcgatttcttatcaggaatcacactgggacccgctggcgacctcgccaaccggcgtgcgcggcctgatgatgctgactaaaaataccgcccaaagtctggggctgaccgaccgtaccgatgcggagcaaagcatcagcggcggcgctcgctatcttgaagatatgatggctaaagttcccgaaaccgttccggaagacgagcgtatctggtttgccttagccgcctacaatatgggttatgcgcacatgctcgatgccagatcgctgacggtaaaaaccaaaggcaatccggatagctggaccgatgtgaagcagcgtttgccgctattaagccaaaaaccgtattacagtaagttaacctacggttacgcgcgtggacatgaggcttatgcttatgtggaaaatatccgtaaataccagataagtttggtggggtatttgcaggaaaaagaaaagcaggaagcggaagctatgaaactggcgcaggattacccggcggtgtcgccggaggagctgaataaagcacccttccccttcctgtcgtttttatcgcagtcatcaggctacctgacgcattcgccgtctttactgtttacgccgcagaagaaagaagaaaaatagcgcgatggtcttattggatggcgacgcgcaacctcttatccggcattgcgctatactgccggccccgcgccttccgcacggtcggctttcttcagggctttaatttcctgacgacgcatacggaaaaaatcactgagcagcgtcgcacattcatcgcgcagcaccccttcaataatgtcgacccggtgattcattcccggatggtgcagcacatcaattagcgatccggccgcgccggtttttgcatcgcgcgcgccaaagacaacgcgtccaatgcggctatgcaccatagcgcctgcgcacatcacacagggttccagtgtgacatacagcgtggtatccagtaaccgataattctgcaataccagaccgccctgacgcagcgccattatttcagcgtgcgcagtaggatcgtggcggccaatgggtcggttccagccttcgccaatgacgcgatggttatgcaccaataccgcgccaaccggaacctcgcgttcgtcccaggcgcgtttcgccagcgtcagcgcgtggcgcatccagtattcgtgatctaattcgacatcagacaaagaggtaactccggtaatgaaagcgggcggcattatacacagacgctatgcgtttcactattcgagctgctgcaactcgccgtgcggcgtcacccgccagcgatgctggcaaaaataaagcagcgggttatcctgtttgctgtcgctgtagccgctataaagacgcagcggcgtaccgattttacgttccagttgcgcgactttttcatggcccagacagcgcacggttaatacccagccgccataccgtcgcgccatctggctggcgatgaggttaacgcgcggcagccacggcgtatcaaaatagacttgctctaccaatgattgcggagaaccggtaataagccagatatccgcgtcagagctcaatagataggtggtcagacgctcctgtactaccggaaacgccgtgacgttagcgcgaaaccaacggacaaaatccgcctgatgcgcctgcaaacgcgtttcgctatggccaaaagtacagccccacaataacagactcatcggccagcgggccgcacgcccttttaccagtaaaccgataccgataatgggcaacagcggcagtacgagcagcgcatttagcggctgacggcgcagcaaataacgcagaaaactgccgaacatatcctgttgatgtaacgttccatccaaatcaaaaaagacgacacgacgctcgtggctgaccaaaccttactcctctggatcattgaaccccagcagccaggtaaaaataaacccggcaattaccgctattaaatagcctaacagatagaacaggacttttccggcaacaattgttaatgccagcggcaaaccggaaataccaaaggtaattaccgtcgccactttccagtagctgatcaacgccccgcctaccgcgccgccgaggcaagcgccaataaatggcttacccaatggcagcgtgacgccaaaaatcagcggctcgccaatccccagcagtccgaccggaagcgcgcctttaatcacctttttgagccgcgcattgcgggttttcatcagtacggcaatggccgcgcctatctgaccaacgcccgccatcgccaggatgggaaacagcgcgttatagccgtgcgcttgcaccagctccacatgaataggcaccagcccctgatgcagcccggtcagtaccaacggcaggaaagttccggctagcaccgcgcccaccagaaaaccgccgcgatcgatagcccaggacgcgccgtgagcgatagcgtctgaaatccagccgccaagcggttgcagagcgacaatcgctaccgcgccggtgataacagtcgtcaataaagggttaagaattaactccagcgaccccggcagcagcttacggaactggcgctcaatccagcacattaacgccaccaccagcaggacggcgataacgccgccccgtcccggctgaagcgcctcgccaaagagcgtaatctgcgccagttgcgggctggaaaggatccccgccatcacgccgcctaacgcctgcgatccgccaaagactttcgcggtattgacgccaaccagaatgttcatgatagcgaacaccgcgctaccaaatatccccatcaggcccagcaggttaggatagtggacggcaacatcgccgacgatatccggacgtttaagaatgttgataatgccggtaatcaagccggatgcgataaaggcggggataagcggtataaaaacattcgccagcttacgcaacgcatcgctcatcggcgctttatacttcgctttcgcctcggatttggtacgcgccatagcgtcatccggctttacaccacctacggcaatctgcacgcgcatcgcatcaaccacctgtgcagccttccccggtccaacgatcagctgatgttgctccccttgctttacgtatccactgatgccaggcaacgcttttaagcgcggaatatccagttggctgtcgtcctgtacctccaccctgactcgcgtcatacagttttccaggcgcagaatattttgctctccgccgataccacgtaaaatgtcgctggcgagcgctgccgtcttatccatacacacctctttagtgttctaacgccgcccttaaaaagccctgatgagcggcgagtttttccctggcggctgcagcatccagccccgtaagcgccatcaaaatggcgggcttaacctcaaaatcggtctgtttcagcaacgtttccgcctcttcacgacctatcccggtcgcttcaacgaccatccgacacgcgcgatcgaccagtttgacgttggtggctttcatatccaccatcaggttttgatagaccttgccgaacttcaccatcgcgccggtagaaatcatattgagtaccattttctgcgcggtgccggatttcagccgcgtggagccggtaagcgcttccggcccgacaacgggcgaaatggcgatattagcctcccgcgcaataggcgaatctggattacaggagacggcaacagtggtacaaccggactgtcgcgcatagcgcaggccgccaatcacatagggtgtacgacccgacgccgcgagccccacgaccagatcctgttcttgcagatttagcgcgacaagatcgtcttcgcctgcctgttggctgtcttccgcgccttcgaccgccttcagcaacgcgcccggcccaccggcaatcagcccgacgaccagaccgtgcggaacgccaaacgtcggggggcattctgaggcatccagtacgccaagccgaccactggtgcccgcgcccatatagatgatacgtccgccagacttcagcgccgccacagcggcatccaccgcacgcgcaacgtcaggcagagtggcttttaccgcttccgctacccgcgtatcctgttcattaaaacgcttaactaattcaggagtaggcaacgcatccagatccatcgtttgcgggttacgggtttcagacactaaggtaccaagattcatttttgtccctctggaatttttaattcataataagcgtccatgatggaatagaatattcccccaggcgagtgaaatttcgttttgtcgtcgccatcacgtttcgcaggagctgcccatgaactgtttgattcgtattcgccagcgttatccggatctcgcgcaaagcgacaggaaactggcggattatctgctcgcgcaaccggatacagcgcgacatctgagctcgcagcaactggcggccgaagcgggcgtcagccaatccagcgtagtcaaattcgcgcaaaaactggggtttaaagggtttcctgcattgaaactggctatcagcgaagcgttggccagcaatcctaatccgcattccgttcccgttcataaccagattcgcggcgacgatccgatgcgcctggtcggggaaaaattaattaaagagaatgtggcggcgatgcacgccacgctggacgttaacagtgaagaaaagctgttagaaagcgtcacgatgctgcgccacgcccgccgtattgtgatcaccgggattggcgcctctgggctggtggcgcaaaattttgcctggaagctactgaagattggcattaacgcggtggttgagcgcgatatgcacgccctgctggcaacagtgcaggcgctggcgccggaggatctgctgctggcgatctcttattccggggaacggcgcgagctgaacctggcggcggacgaaacattacgcgcaggcgcgaagatcctggccattaccggtttttctcccaacgccttgcagcagcgcgccacccgctgtctgtatacgattgccgaagagcaggcgacgcgcagcgccgctatctcctcgacacatgcgcaaatgatgttgaccgacttactgtttatggcgctggtacaacaggatttagagcgggcgccggagcgtattcgccatagcgaggcgctggtaaaaaaactggtttgaaaatggctcttccgcctcatgcagaagagccatcaagtttattgcgcttctttcgcgtgaatcaattgcgtcaggagtgtgttaaccggtacggcaatattgttctgagcgccgattcgcgcaatcgcaccatttaaatagtcgatttcagtcagtcggcctttatgtaaatcctgatgcatagaaggatagtggtggccgctctcacgcggatcgaacactttcttcaccgtattcatcaccatttgctcagtcaacggaatattctggctggcagcaaccaatacaaactcatcaactaccgcttgcgctaaatctaaagcaccaggccgctgaccaaatccgccgacattacaatccagtagcgcgcaataggtgttcattacgctattaaaggctgctttcttccagatcgataataatacgtcagggcttatttcagcattcaatcccgcgctattaagagtggcaatgaccttagcctcttgagccgaatcctggctggcaatcggctgcagttcaatcgttccggtaccggtggccataatatgcccagccccctccagttcgctggaccataacgtcacacccgcatagattttctgccgatcgacatatttctccagcgtttcaatatttcccaggccgttagataaaatcatcacgaccttcgcggctggcagcagcggcttaatacgcagtaacatgctatccagctgcatggctttggtaaacagaataaccagttcaaactccccctgggattcatcagccaacatagcagggatggggtaatacttctgagtcgtttccgtttcgacaaacaaccccttgctacgaatagcgtcgacatgctcctgccagctatcgataagcgtcacgtcgtgcccggcctccagcagcatatagccaaaacgacaccccatagcgcctgcacctgcgattgcaattttcatttttatttccttattatctgattaatgaattttggctaaaaccgttgcgacatattttttcgttatcagggtcaacacgactccaataagcaatagcaccgttgtcaaaataaatactgtattgtagcttccggtatattttgcaatagcggacgttacataaggagcaataaccgcaccgacggcaaaaccaaaatacataaagccgtagtttagcccctggttacgcataccaaaattctggctggtcaaaccagggaagataactaatataccggcataagcaaagcccacgcccagagcgctgaaataaaataccgaagtattgccattgaagaaaaataacagcagcatacacaagcaggtaaagaggtaaacaataaccagcgtattatagccgcctaatttatcggttaaccctccccagaacaggcgaccgatcgagttaaatatcgagaccaggctaacgactaatgcaccggacagtaaaccgtactgcgtcataccaatttgcgcagagcttgagctaattaccatcccagagaacacgcccagcgccagaatcataaacagcagccagaagcgcagatctttcagcatgtgccgatagtctttatccagtggcgacgctttaattcctccgctatcttttgctggcgcgctacgaataaagaactggacgataaaaataaccaccagataaacaatacccagatataacaacgcccgactaacatcgtgagtttgcgccataaaatattcggccaggcgggtgcaaagtagcgtcccgacgccaacacccgccagtacgataccgctggcaagaccgcgacggtcagggaaaaatttcagaatattattaagattacccgtaaaagccaggcccgatcccaacccggcaatgacgccgtaggttaaaaacagcatgggcaaattatccacaaacccggacaagataaaacctaaagaaaacaggataccaccgataactatcgcctgctttcctttaccattgtcgatcattctcccgccccaaatcatcggtaaaggaatgatccccatattgatagagaatgctaacgccagcgtagccggatcccagtgatattgcgccatgagtggtgttttgaaatagctaaatgcgtagacgcccccgagcacaaaattgatgcacacgtgagcggcaagcattccccagcggttgattgatgccgacataattttccctttttaaaatgcactgatcacagtttaaaaaaagcaaaataggcaaacaatttggtattttttataatcgttataacaaaacccaatctattggcattaaattttaatgaatatcaaacaactacactccttcctgatattgtgtgatgaattacattatggtcgggcagccagtcgcctgtttatcactcagccatcattaagtcagcaaatcaaacaacttgagtcatcacttaaaacaatattatttaagcgaaaaggtagaggaattaaattaacaaaagcaggcattattttgcaacgacacgctaacaaaataatgctggatttaaaaaatgccgaaaatgaacttcttccctatcaggaccaacagcgcgatactatttcaatcggggtgtcaggcagttacctggtcctgcccgcttttcgcaactttatggcgcaccatccggaaatatctttaaatgttaaagagttctcaactgagcaaaccattaaaaagctgacggatagcgccgttgatattggcattgtttatcgaacagcgctccctgcccagctaagctcgaccatgctgtttgaagatgaaattatcgctgcaatcccactttctcatcctctggcgacacgcgaacgtctgcatttaaaagatttaaacgaccagcccattatcgtgcttaatgactctctgctattaagagggatcatcaccacagaatttaataaccgcaaagtcgttcctaacgtcatctgcgaactggataaccactactcatgccttgagtatgccgaagcgcagattggcatcgcatttattacccgctcgctaacccatttatcgacacccaaaaatgttcgcctggtttcactgggcatccccgcattctttattcctgtcatgctggtgcacagtaatgacctttcactggataacgcaaccatctgcctgctcaagcagatcaaaaatttttacacggtagataacaaatcagcgccagaaaagagctggcccgagcagaaaataggcgtataatgcccgcccgatttgtgttgtttctgagaatttcctgatggcgctgttaatcaccaaaaaatgtatcaattgcgatatgtgcgagccggagtgcccgaatgaggcgatttcaatgggcgacagcatttatgagattaacagcgacaaatgcaccgagtgtgtaggccattacgaaacgccgacctgtcagaaagtctgcccgatccccaatacgattttgcaggatcccgcccatgtcgaaaccgaagaacagttgtgggataagtttgttctgatgcatcacgcagataaactgtaagcgggttaacgcatttccaacgcaacaatgtctgatggcgctatgcttatcaggccgacaatatatcggcctgtaggtcagataacgtgtttacgccgccatccggcaaatctaactttccagaatgaccgtagcgcaggcgtaatggcgttcatcggccaacgtgacatgcatatgcgccacaccgagtttttccgccagcgttaacgcctcgccccacagccgcaaacgtggttttcccagctcatcgttaaacacttcgaactgattgaacgccagaccgttgcggatgccggtgccaaaagctttcgctgccgcctctttgaccgcaaaacgcttggcgagaaaacgcaccggctgctgatgcgtctcccagatagcccactcgttgtcactgagcacacgccttgccagacgttcgccggaacgggagatcactgcctcaatgcgggcaatctctacaatatccgttcccaggccgagaatcgccattagccgcgcgcttccagcatcaaacgtttcatttcagccaccgcctctttcagccccgtcatcaccgcccgaccaataatggcatgaccgatattgagctcgtgcatttccggcagtgcggcaatagctttgacgttatggtaggtcagaccatgacccgcatttacttttagccccagacgggccgccagggtcgcggcgctggcgatacgcgccagctcttttgcctgttccgcatcggtttctgcgttggcgtagcagccggtatggatttcgataaacggcgcgccgacttccgccgccgcgttgatttgcgtttcatcggcatcgataaagagcgaaacctggatgccagccgccgccaggcgcgcacaggcatcacgcattttatcgcgctgtccggccacatccagaccgccttcggtggtgacttcctggcgtttttccggcaccagacaacagaaatgcggcctggtttctacggcgatcgccagcatctcttcggtcaccgccatctccagattcatacgcgtatgcagcgtctgacgcagaatgcgcacatcgcgatcggtaatgtggcgacgatcttcgcgcaggtgtacggtaatgccgtccgcgcctgcctgttcagcaataaacgccgcctgtaccggatccggatagtcggtgccgcgcgcattacgtaacgtggcaatgtggtcaatattgacgcctaacagtaattcagccatgacaatcctcgttaatctttcttcatttttactgtgcgtttgggcataaattgccggaacagctcccggctttttaacggttttcccccaagatacggctttaatgccatacgggtaaagcgtttagcggcacgcagggtatctacatccggaaattcccgctcctccaacgctttcaggtgccgtccggtaaaggtgttgttatcgatgacgacgctggcgaaaaagcctttttcttcgcggtaacggtaggtcatggtgtcatccacccgttcgccgctgcctgcacagtgggtgaaattgacgccataccccagatgacccagcaacgccagttcgaaacgtcgcaacgccggttcaggcgagccggtggttcccgccagcgcctgaatacagttcagataatcaaaaaagagttcggagaagcgcgtttcatattccagtacgcgagagaggagttcgttgatgtacaggccgctatagagcgtaataccgcttaacggcagcgccaaagaaactgcctcggcactgcgcagggttttcacctcgccgcgtccgctgtagcgtagcaataacggcgtaaaaggctgcaacgcgcctttcagattggaacgtttagatcgcgcgcctttggcgacaaggcgcacgcgccccgattcttccgtgaagacgtccagcatcaggctggtttcgctccaggggcgactgtgcaggacaaatgcgcgctgccacccttccacgctgtgttaactcacagatcgtctacgtaaccgagactgcgcagagcgcgttcgtcatcggcccagccggatttcactttcacccacagttccaggtgtaccggcgcctcaaacatctcctgcatgtctttacgcgcttcaataccaatggttttgattttggcgcctttgttgccaatcaccatcttcttctgcccttcgcgctcgacgaggatcagcccgttgatatcatagccgccgcgttcgttggtaacaaaacgttcaatctcaacggtaacggaatacggcagctcggcgccgagaaaacgcatcagcttttcacgaatgatttcagacgccataaagcgctgagagcgatcggtgatgtaatcttccgggaagtgatgaatcgcttccggtaaatgtttacgcacgataccggcaatggtatcgacgttcatacccgtttcagcagagatgggtacgatatcaagaaagttcatctggcttgccaggaactggaggtgcggcagcaaatcggctttttcctgcacgttatccaccttgttaacggcgagaataaccggcgctttgccatcgcgcagtttgttcaggaccatttcgtcgtccggcgtccaacgggtgccttccacaacgaaaatcaccagctcaacgtcgccaatcgaactgctcgccgccttattcatcaaacggttaatggcgcgcttttcttccatatgcagtcccggggtatcgacataaattgcctgatacgggccttcggtatgaataccgacaatgcggtggcgcgtggtctgcgctttacgggaagtgatcgaaatcttctgcccaagcagtttgttcagcaaggtggatttgccaacgttcggacgtccgacgatggcaataaatccgcagtaagttttgtcagtgctcattccaactccagttttttcagcgcctgttcggcggcagcctgctccgccttacgacggctggaacccgtgccaaccaccggttcgctcaggccgctgacctggcagtggatagtaaattcctgatcgtgcgcctcgccgcgtacctgcacaaccaggtaagatggcagcggcagatggcgaccctgcaaatactcctgcaagcgcgttttaggatctttttgtttatcgcccgggcttatctcatccagacgggttttataccagttaaggattaactgctcgacggtctggatattgctatcgagaaatactccgccgattaacgcttccacggtgtccgccagaatggactctcgacggaatccgccgctttttaattcgcccggccctaaacgcaggcactcgcctaaatcaaattcacgggctaattccgccagcgtattaccacgtaccaacgtggcgcgcatacggctcatatctccctcatccacccgtggaaaacggtgataaagcgcgttagcgataacgaagctcaggattgaatcgcctaaaaattccaggcgttcgttatgtttactgctggcgctgcggtgagttaatgcctgctgcaacagctcctgatgattaaaagtgtagcccagcttccgttgaagccgattaattacgatggggttcatgcgataccaataaatgaatgcgtcaacaatccagcacacgaaacagacctgatacacgtcatctgtcctgccgcatcgctgcagcggaaagaaggttgtctataaccaacgctgtttcgtgtgccgtggcgaccaaacggcgccaacctaaaacttcgggggaatattctatacacaacgacaggggatgtcgttagtcttagggaatttatccaggaaataattcacgctgccgctaaaaagacggcagcgtgaacgatcatttcatcacagttagtgaataccgccgatacgactcaggcgtacgcctgtcggccactccccttcctgcttgtcaaagctcatccagatagcgaccgctttaccgaccagattcgcttccggaacaaatccccagtaacggctatccgcgctgttatcgcggttgtcgcccatcatgaaatattgtcccggtggtacaacccaggtcgccagcggttgtcctggctgttggtaatacatgcccaactgatcctgggctatcggcaccatcagaatgcggtgcgtcacatcgcctaacgtctctttacgttcggtcaggcgaatgccgttttctttcgtctcgtttagcggaacctcaaagaaaccgctggtcgcttctccgccgttacggcgggcaaaggtctgtacaaaatcgctcggctcaacgttagagtaggtaaccggcagcgcattttcgcacgcctgaccggagctacagccaggctgaatcgtcacctctttcgcaaccggatcataagtgattttatcgcccggcaaaccgactgcgcgtttgatgtaatctaacttaggatcttccggatatttaaataccacaatatccccgcgctttggatgaccggtttcaatcagggttttctggtagatcggatctttaatgccgtaggcaaatttttccaccagaataaaatcgccgataagcagtgtcggcatcattgagcctgacgggatctgaaagggttcataaagaaatgaacgaacgatcagaacgatcgccagaaccgggaaaaccgacgccccggtctccagccagcccggcttaggcgccactttattgagcgtagcgttatccagcgcatctcccgacgccgtttgcgcggcagcctggcgcgcccgacgttttggcgcgaaaacaaacttatcaacgcaccataaaatgcccgtcaccagtgtggctatcaccagaatcagggcaaacatgctcgccatgccaactccttagagattatttattgtctttaccgacatgcagaatggcgaggaacgcctcctgaggcagctcgacgttaccgatctgcttcatgcgtttcttaccttctttctgtttctgcagcagttttttcttacgactgatatcaccgccgtagcacttcgccagcacgtttttacgtaactgttttaccgtcgaacgggcaataatatgcgtaccaatcgccgcctgaatcgcgatatcaaactgctggcgtggaatcaaatctttcatcttctccaccagctcgcgaccacggctttgcgagttatcacggtgcgtgatcagcgccagcgcatcgacacgctcgttgttgattaacacatcaacacgcaccatatcggaagcctggaagcgcttgaagttataatccagagacgcatagccgcgcgacgttgatttcagacggtcaaagaagtcgagcaccacttccgccatcgggatttcataggtcaacgcgacctggttaccgtgatacaccatgttagtttgtacgccgcgtttctcaatacacagcgtaataacgttacctaaataggcttgtggtaacagcatatgacactcggcgataggctcgcgcagttcataaatgttattcaacggcggcagcttggaggggctatcaacatagatagtctctttcgccgttgtttctacttcataaaccacggtcggcgcagtggtgatcagatccagatcgtattcgcgttccagacgctcctgaatgatctccatgtgcaacaggccgaggaagccgcagcggaaaccaaagcccagcgccgaggagctttccggttcataaaacagtgaggcatcgttcaggctcagcttgccgagcgcgtcgcggaaactttcataatcgtcggagctgaccgggaacagacctgcatagacctgcggtttcacctttttaaagcccggcaacgctttttccgctgggttacgcgctgaggttaaggtatcgccaaccggcgcgccgaggatatctttaatggcgcagaccagccagcctacttcgccgcacttcagctcggtacgatcaacctgttttggcgtgaagatccccaggcggtcagcgttgtaggtctgcccggtgctcatcactttaattttgtcgcctttacgcatggtgccgtttttaatacgcaccagcgataccacgcccaggtagttatcgaaccaggagtcaataatcagcgcctgcagcgggccgtccggatcgccttgcggcggcgggatatcgcgcaccaggcgttccagaacatccgtcacgccgacacccgttttggcggagcagcgtaccgcgtccgtcgcatcgataccgacaatgtcttcgatttcttccgccacacgctccggatcggcggccggcaggtcaatcttgttaagcaccggcaccacttcaagatccatttccatcgcggtgtagcagttcgccaacgtttgcgcttctacgccctggccggcatccaccaccagcagcgcgccctcgcaggcggctaacgaacgggaaacttcataggaaaagtcaacgtgtcccggcgtgtcgataaagttcagttgataagtttcaccatcagacgctttaaaatccagcgtcacactctgggctttaatagtaataccgcgctcacgctcaagatccatcgaatcaagtacctgagcttccatttcacggtcagacaggccaccgcagatttggataatacggtcagacagcgtcgatttaccgtggtcaatgtgagcaatgatcgaaaagttacgtatgttcttcatagagataaattattatgccttacgcctggttgaccagactttagaggtcgctgttctgagcttaacgtctgttttaactgaaacgccgcattctacactacaacgctaaggcgaggaaatgttcatagtgtaaggagagcgggaactggaaaacgcctcgctttttcctgtaaaacaccgcaacgcaggaaaagcgcatgtttatcgggacaacaacccaacgcggcaggtgtaccgttgggcaaaacgtttactggcgcgtttcgattgaggtagtttcgacgcgaacaaggtccggcgggagggcaacgtttaaaatcaccggctgccaggcgtcgcgctccgccagttttcgggaatagccgcgggcaaccagaaaaccgcccacgccgcccagcacggccccgcttaatgcggcaaggtcagatccaaacagcatctgaaaaagcgccgcacaaagaaatagccccgctaaaggcgacatatagaccagcaacgccgaacctaaaaggcttttttcggcgatgcccaactcgactttctgccccggcgccagcggctccgcgcttggcacaacaatggtatgggtggtttgcggccctaatttattcagcacgcgactgccgcatcccgcacgggaggcgcagctgctgcatgacgctttaacgtcgcagctcaccaccgcctgaccattctgccaggagataacggttgcccactctttaatcattgtactgccctgaatttgatactgtcggcaatgcgcttcgccgtttgcggcggaagctcgccgacaatggtgatttccgcgttgtcgcgaacgctgctataaaccgttcggcgcccggtgcgcagcatctgatcgctgctgttttgcgtcgcccggttcacattgacggaaaagctaaacagaccgtcagaataaagccgcgattcgataggcaggttatccatcgtcggcaacggacgacggctgctggaaacttcgctaaagccttgcggcacccaggatggactccagttaaatttcgttttttcgccaccgggaacagaaagcagcggcggcagattcgccttcgccagcgcctgcatgttgctgccgatatcctgactcaccgtgaacgcaataacgcggaactgctccagcgtctcgccatcgcgatccagcagatcaacgcgcatcggtagtttggtgtccatgtccatccagacaatatagctgtaacgcgtaccatcgcgcgccacaacgcggataacttcgcacaatctgtctgcgatacgggtgcgtccgacagaaataaagtcgtagtatggcgccaggcgcttgaagtcggtgtaaatcagggaaggcagagaatcgacaatataatcaccgttcagggtgaacggctcaaggcccggttcaaaataactgatttcattaccacgctgtacgacctcccggcggggaccgtccaactgtagcaattgcgcaagcgggcgaccatccaggcgtgcgtgtcgataacgcagagattcaacgccttgtttcgtgatgctgacgaatgacagctcgtaattcagtgactgactggcgatgttcatctgctgcaataacgccccggacgcagggtcggccgaggcgtttgctgagaagaacaggctagccgccacaagggacatggcaaaccaaagttgcttcattactgcgattgcgttcctaaagtttggattcctggcacctgtaccgcggcttgctgggtttgcgcctgctcaaactgaagctgttcggagtgcagtcggcgctgcagttcatagtcctgcaacatggcattaatgcgacgacgctgctcctgtacctgctgttgctgactgccgacaggcgctgcttcagaaggcactcccagacttaccgggctggctttccccatcataggcagggtattgaaaaccggcgtttcaggttgttgggatgtttcagattgcccattatagtgctggacaccgacgataactgcaagtgaaacgcacgccgccacgcccatttgggtaagctgcgccgcccacggacgcacttttttccagaacggcattttctgccattgctgcggagcgggttgggcctcagggattaatggcgacacctgacgtactggctcgttttcaatagcggccatcacgcgagcggatatatcgaaatggagaacgtcaggcgtatccccccgcattgaatcgcggatcaggtgataactctcccaggttttctgcatttccgggtcgtgcgtaagcgctttgagcagctcactatccaacgtttcgccatccatcaaagcggaaagtttttctttctgcatgcctaataccttttccagtatcccgctatcgtcaacgcctgataagcggttgaactttattatcaatagcttcccgcgcccggaagatacgtgaacgcaccgtccccaccggacaatccatgatagccgctatctcttcatagctcaggccatccagctcccgtaaggtgattgccatacgtaaatcttccgggagggactcaatagttcggaaaactatctgtctcagttcttctgacaacattaagttctcagggttcgaaatttctttcagcgcgccgccgctttcaaagttttctgcttcaatcgcgtctacatcactggaaggcggacgacgcccctgcgcaaccaggtagttcttcgcagtattgaccgcaatacgatacaaccaggtataaaaagcactatccccccggaaagaatccagcgcgcgataggccttaataaatgattcctgtacgacatcgggaacgtcgcccgatggcacatagcgggaaaccagactcgccactttatgctggtagcgcactaccagtaagttaaaggctttctgatctcccttctggacccgttcaaccaggacctggtccgttaactgctcgctcatccgaggtaatgtctccccaaaccaaatttccacgcgctttcgaaacgccactccataagccgcactatgagcaagcaacaggttggagtgtctatgtttcgtaaagttccgttacgcatttgtttttgtttgtcatgttgtagacaggtcttatcttccattataagtctacagatgctgaacaacgcactatctgtacagaaatgcccatttcgtcgtttgcagagtaacctaacagcatctttatttcactacaaaatccgacgctaacaccctgccctataaaatattttttgccgtttatctctcgccgtatttttattttatgtttaataagcacaacaccagcgaaatcatcacgtgctttttagcgccatatagtgctaatctgccgcaaccgtgtttagtaaattaaacaaaaaaccatgatgacaactcctgaactgtcctgtgatgtgttaattatcggcagcggcgcggccgggctctcgctggcgctgcgtctggctgaaaagcataaggttatcgtcctgagtaaagggccggtgagcgagggctccacgttttatgcgcagggcggtattgccgccgtgtttgatgaaaccgacagtattgcgtcgcatgttgaagatacgctaattgctggcgccggaatttgcgatcgccacgcggtggagtttgtcgccagcaacgcccgtacctgtgtgcagtggcttatcgatcagggcgtcctgtttgatacgcatgtccagccaaacggcaaggagagctatcatctcacgcgtgaaggcggccatagccatcgccgtatccttcatgccgccgacgctaccggaaaggaagtcgaaaccacgttggtcagtcgggcgcaaaatcatcctaatattcaggtgctggaacgcagcaacgccgttgatttaattatctccgataaaatgggtctgccggggcctcgccgggtcgtcggcgcctggatctggaatcgcaataaagagtgggttgaaacctgtcatgcgaagtcggtggtgctggcgaccggcggcgcctcaaaggtttatcaatataccactaacccggatatttcctccggcgacggtatcgcgatggcctggcgcgcaggctgtcgggtcgctaatctggaatttaaccagtttcatcccaccgccctttatcacccgcaggcgcgtaattttctccttaccgaagcgctgcgcggcgaaggcgcataccttaaacgtccggacggttcacggtttatgccggacgttgacgaacgcggggaactggcgccgcgcgatattgtcgcccgcgctattgaccatgagatgaaacgactcggcgcagactgtatgtttctcgatatcagccacaagcctgacgattttgtccgccagcacttcccgatgatctatgcgaaactgctcgatttggggatggatttaaccaaagaaccgattcccattgttcctgccgcgcactatacctgcggcggcgtggtcgtcgatgattatggtcgtaccgatgtagacggcttatatgccattggcgaagtcagttacaccggcctgcacggcgctaaccgtatggcgtccaactcgttgctggaatgcttagtgtacggctggtccgcagcaatggatatcgacaggcgaatgccttctgtccacagcgttgacgtccttcccgcctgggatgaaagccgcgtggagaacgccgatgagcgggtggtgattcagcataactggcacgaactgcgtctgctgatgtgggactatgtggggattgtgcgcacgacgaaacggctggagcgcgccctacggcgtattactatgttgcaacaagagattgacgaatattacgccaactttcgcgtctcgaataatttactggagctgcgcaatctggtgcaagtggccgaactgattgtgcgttgcgcgatgatgcgtaaagagagccgggggctgcactttacgctggattatccgcaacaactggctgaatcaggcccatcgatcctttcgccattaacgcctcacataaacagataaaatgcctgggtcagcgccgtataactttcagaataatgctggtctgacccgcgaattactaatctgtcgctaaagcactccccggcttgcggggagaatgcgagcaaaacccggtgcggcaagcgcgcttcgttttccgcaacgtcagtacgtagccgcaaatgccatcccatgttgagcgcttgctgcgtaaaagcgttacctatttgttccggcaagactacgcaaaaaaagccatcttcggtaatacaatccgccgcaatagccaataacgtctggtgatccagcgtagcggtgtaacgcgcctgctcccgctgcggcgtggcgcattccacaccgggttcgtaataaggcgggttgctgataataagatcaaagcgtaccgtctggcgaggcgcccaactctgaatatcgtcagtatgcaccgttattcgatgcggccagggagagtgagccacgttttcctgcgcttgcatggcagccccggcatccagttccacggcgtcaataggcacattgtcatccgtccgctgcgccagcattaacgccagcagaccgcttccagtaccgatatccagaattcgctttacatccgcgaccggcgcccacgccccgagtaaaataccgtcagttcccactttcatcgcacaccgatcgtgtgcgacaaaaaactgtttaaacgtaaatccgttacgacgaagaacggagccagactgagacatgtaaaaacaaccttgcaaaaaacggcgacagcgccgagtgaaaacaatacctgagaagggatatccatacaaacagatgaagattgcggccgtaacgtctataatcagcgccccacacagaggtagaacatgactgtaacgactttttccgaacttgaactcgacgaaagcctgctggatgccctccaggataaaggtttcactcgcccgaccgccattcaggctgccgccattccgcctgcgctcgatggccgtgatgtactcggttctgcgccgacaggcaccggtaaaacggcggcatatctgctgccggcgttgcagcacctgctcgactttccgcgtaaaaaatcggggccgccgcgcattctgatcctgacgccaacccgcgaactggcaatgcaggttgccgatcacgctcgtgaactggctaagcatactcatctggatatcgccacgattaccggcggcgtggcctatatgaaccatgctgaagtgtttagcgaaaaccaggatatcgtggtcgccacgacgggccgtctgctgcaatatataaaagaagagaactttgactgccgggcggttgaaacactgatccttgacgaagctgaccggatgctcgacatgggcttcgctcaggacattgaacatatcgctggtgagacccgctggcgtaaacagacgatgctgttctccgccacgctggaaggcgatgcgattaaagattttgccgagcgcctgctggaagacccggttgaggtttccgccaatccgtcaacccgcgagcgtaagaaaattcaccagtggtactaccgtgccgacaatttcgaacataaagttgcgctgttgaagcacctgctaaaacaagacgatgcaacccgttctatcgtgtttgtacgtaaacgtgaacgcgtccatgaactggccgaaacgctgcgtctggcagggatcaacaattgctatcttgaaggtgagatggcgcagatcaaacgtaacgaaggtattaagcgtctcaccgacggtcgcgttaacgtgctggtcgcgaccgacgtcgcggcacgtgggattgatattcctgacgtcagccacgtcattaacttcgacatgccgcgcagtggcgatacctatctgcatcgcattggtcgtacaggccgtgctggccgcaaaggcactgcaatctcgctggtagaagcccacgaccatctgttgctgctgaaaatcggccgctacatcgaagagccgctaaaagcgcgcgtcattgatgagcttcgcccgaccacgcgtgcgcccagcgaaaagctgaccggcaaaccgtcgaaaaaagtgctggcgaaacgcgccgagaagaaaaaagagaaagaaaaagagaagccgcgcgtgaagaaacgtcaccgcgatacaaaaaatatcggtaagcgccgcaagccaagcggtacaaaaatgcaggagcaatccagcgaagagtgatgataatgccgggttcgttaacccggcatttttttatcttccacggtaaaacacgcctccatacactgtataaatatctgcattgccgggctgaccgctttcccggcatgatgggcgcacagcgccatgatcgatagcgacggcgcgccaaacggcagctctttcaactgaccggtactaagttctcgttcaacggtaaaacgtggtaaaaagctgatgcccaggttagcagccacacactgtttaatactttcaatactccacagttcaatggtgttttccagcgtaatccgcctctgccgtagcgtactttcaaatagctggcggaagacacattgcggttcattgatgatgaagctgcaggggatatgctgatctggctgcgtaaaatcagcatcctgtagcagtggagaggccaccagcgccagcgactgctcccccagttgctgcatcgtgagcgcgtcatcattacctacgcgataaaaaacgcccagatcgacctcgtcattcagcaacgcatcacgtatcacatagcaattcagcgactgtagcgacaatttgacattcggcgctcgcagcttaaaacgttgtagaacctgcggcattttgtacgccagtaaggtttcacctgtcgccacgcgcagctctccgccgggttctgcatcctgccttgcggcttcacgaatcaactccatcacacgcgtcagttcatggatatgcggcatcagctttttcccctcagtggtcaggcacattcggcgccctattttctcgaacagttgcagggaaaactcacgttcaagctgttgaatatgaaaagttaccgtcgactgagtgcagcacagcttttgcgaagcccgcagaaacgagccctcttccactaccgttttcagcgtaataaaccgacgcagatccataaccaccaacctatcgaaaatctcgaattcagaattaaaaaacattcatttttttaaatatttcatatcgggtactgtctgctaaaacagaggagatgacaagtgacaccgatgcttttaagcgctttctggacttatacattaatcaccgcccttacccccggcccaaacaatattctcgcgcttagcgcagcaactgcacatggttttcggcagagtattcgtgtactggcaggtatgagtctgggatttttggtcgtcatgctgctgtgcgccgggatcgcgttttcccttgcggttatcgatccggcaatcattcatttgctcagttgggtaggggctgcgtatatcctgtggctggcgtggaaaattgccaccagtccagcggcggatgagaaggtcagaccaaaaccggttggcttttgggtaagctttggcctgcagtttgtgaacgtcaaaattattctgtacggcattaccgctctgtctacatttgttttaccgcaaacgcaggcgctgaactgggtcatcggcgtcagtatattgctggcattgatcggcacgttcggtaatgtgtgctgggcgctggcgggacatctgtttcagcgggcgtttcgccattatggtcgccagttaaatatcattctggcgttactgctggtgtactgcgcggtgcggattttttactgacccaaataaaacaaaagcggaaaaggcccggcctcttccgcttgttattaccggataagccttacaggctttcggtaaaggtacgagcgataacgtcgcgctgctgttccggcgtcagggagttaaaacgcaccgcataaccagaaacacgaatagtcagctgcgggtatttttccggatgcttaaccgcgtcttccagagtttcacgacgcagaacgttaacgttcagatgctgaccgccttcaacgcgtacttccggtttaacttccatcggaatttcccggtattcaatctcgcccagtttgctgacagccacaacttcatcttcagcaaagccggattttgcaacgatgcagcgcgcttcgcctttttcgctgtccagcagccagaaggaattcagcaggtcgtcgttagcggctttagtaatctggatacctgtaatcatgtgatgcctccccaggcaaaattatttgatttcggtcggcctaatcccggccaattggtaaaaccattgttgcttgagtgtatatatacccttcgatcacccttcattctttgatttaaatcaataaaaaccacaccataaaaagggtgatgaagggaatttattgttttacatcaacttacaccattcagacctataaactttttacataaattttcaactatcttttgtaggtaaccgtttttgtagcacgcaggattttgcactgcagaaagaagcagttaagctaagggaactggaaattcgcaggagagcgagatggcgactgagttaacctggcacgatgtgctggctgatgagaaacagcaaccttactttatcaatacgcttcacactgttgctggcgagcgtcagtcgggtatcacggtctacccgccgcaaaaagatgtgtttaacgcctttcgcttcacggaactgggcgacgttaaggtggtgatcctgggacaagatccttaccacggccccggccaggcacatggtctggcgttttccgtgcgccctgggatcgctcccccgccgtcattagtgaatatgtacaaagagctggaagcctccattcccggctttgttcgcccagcgcacggttatctggaaagctgggcgcgccagggcgtactgttactgaatacggtgctcacggtacgggcaggccaggcgcactctcatgccagcctggggtgggaaacctttacggataaagtgataagcctgattaaccaacaccgcgaaggggtcgtcttcttgctgtggggctcgcacgcccagaaaaaaggcgcgattattgatccacagcgccaccatattctgaaagctccgcatccctcgccactctctgcgcaccgcggattttttggctgtaaccattttgcgctaacgaaccaatggctggaacaacacggcgagaaaactatcgactggacgccagtattaccggctgagagtgaataacgttggcggctcgccgttttatcgcccggataacagcgcgaaagcgccttgtctgaccgggcggtaggaagtacataatcggcccggcgcgcgttgcgtcaccgggctgcagcccttacgctttattctgtcgccaccactcggcgagcagcacgcctgtcgcaaccgacacattcaggctttccacgttcccggtgccgttaattttcacgcacagatcgtcgggttcgcgcgccgcttccggcaggtagtcatattcacggcctaagaccagcaccatcttttccggcagggtcgtactaaagagcgcctgaccgcgatcgctggacgtcgtcaccacggtgtaccccgcctgacgaaaatcatccagtacgtcaacaatgctttcaccagtaatcggctggacatgctccgccccgccttccgcagtacgaatcgccgcaccggactccagcaacgccgcatcctgtaccaccacgcctttcacgccgaagtgcgcgcagctacgcatcatgccgcccagattatgcgggttagcgacatcttccaacgccagcacgcagtcttgatccgccgcctgctttacccattgcttaacggtcgtaccgttacgctttttaatcaggaaacacacgccaccgtggtgctcagtcccggaagcttttgccagttcggcttcatccaccacatggtaggctttacgattcgccgccatccagcgcagcgcctctttaaaacgcggcgttacgctttggataaaccatgcgcgcacgatggcgtcaggacggctctggaatagcgcctggcaggcgttttcaccgtagacgcgcgtctcttccgcacgctggcgacgcaaaacttcagggtcaataaaacttttaccgctaataccaccatgatcgactttctcaggcgtttcatcgcctggcgcgcgggacacggtgcgccacggcgaagtttcatgtttacggtcacggctctgattatttcgctcatcacgggcggggcgacgtccaccgtcagtgcgagactttgctgggcggcctccccctttcccggtacgcgggttatgggtgcgtttatcagagtcatcatcactacggacatacatcactttgactttgccgcttttgttttttaattcatcgttcatgcttttctccaccagcgctgcgcgaagcgcgaagattacccgatgtgcatccggttagccatgatttcgtttaaaagcttgcgactattgtactcattgaataaaacacattgttgtttagcacagactcctcgataatatgtaacattatagaaacatcccgcgcgtagcgggacgtcttccgacgtattcagaggttagctatgaacaccgtttgtacccattgtcaggccattaaccgcatccccgacgatcggcttcaggatgcggcaaaatgtggacgctgcggtcatgagttgtttgacggagaagtcattaatgcgaccggcgaaacgctggacaaactgttgaaggacgatcttccagtggtgatcgacttttgggccccctggtgcagcccttgccgtaactttgcgccaatcttcgaggatgtcgcagaagagcgcagcggtaaagtccgtttcgtcaaagtgaataccgaggcggaacgggaactcagcgcccgtttcggtatccgcagcatcccgacgattatgatttttaaacatggacaggtggtcgatatgcttaatggcgcagtgcctaaagcgcctttcgacagctggctgaacgaagcgctgtaaacgccacggggcgcatcttgtgccccgttttcacctctgccacaatagcgtttttctccgcaaacgctttctatgaccaataacgctgtccttcagttacgcgccgaacggcttgcgcgcgctactcgcccttttcttgccagaggcaatcgggttcgccgctgtcaacgctgcctgctgccgctaaaatcttgcctgtgtgatacgttaacgccttctcaggcgaaaagccgtttttgtctggtcatgtttgacactgaaccgatgaaacccagcaataccggccggctgatagccgatattttgccggataccgcggcgtttcagtggtcgcgtaccgagccgccacaggcgttgctggagttggtacagcatccggattatcaaccgatagtggtctttcctgcgtcctacgccggcgaagcgcgcgaggtcatttccaccccgcccgccgggaaaccgccgctgtttattatgctggacggcacctggcccgaagcacgtaaaatgtttcgtaaaagcccttatctggatcatctgccggtcatttccgtcgatttatcgcgtctttcagcttatcgtctgcgtgaaatccatgccgaagggcaatattgtaccgccgaagtcgcgatagcgttgttagatctggcgggagataccgaggcggcaaccagtttaggtgaacatttcacccgttttaaaacgcgctatctggcaggaaaaacgcaacatccgggaaacgtcacagcataaaatagcgaaagcgtttaaaattatccggtcacttctgtgtaagggaaaccggtatgagccagcaaggactggaagcgctactgcggccaaaatcgatcgcggtgattggcgcatcaatgaagccccaccgcgcgggttacctgatgatgcgtaacttgttggcgggcggattcaatggccccgtccttcccgtgacgcccgcctggaaagccgttttaggcgtcatggcctggccggatatcgccagtctccctttcacccccgatctggctattttatgcactaacgccagccgtaacctggcattactggacgcgcttggcgcgaaagggtgtaaaacgtgcattatcctttctgctcccacgtcgcaacatgaagaacttcttgcctgtgcccggcattataaaatgcgtctgctgggtccaaacagtcttgggctcctcgcgccgtggcaagggctgaatgccagcttttctcccgtcccgattaaacagggcaagctcgcttttatttcccagtctgccgccgtttccaatactattcttgactgggcgcaacagcgtgaaatgggcttttcctactttatcgcgctgggcgatagcctggatattgatgtcgatgaactactggactatctggcgcgcgacagcaagaccagcgcgattttgctctatctggaacagttaagcgacgcccgccgttttgtttccgccgcccgtagcgcttcacgtaacaaaccgattctggtgattaaaagcggccgaagcccggcagcccagcgtttacttaataccagcgcgggaatggaccctgcgtgggatgcggccatccagcgcgcaggcctgctgcgagtccaggatacgcacgagcttttttccgccgtcgaaacactgagccatatgcgtccgctacgcggcgacagactgatgatcatcagcaatggcgccgcgcctgccgcgctggcgttagatgagttgtggtcgcgtaacggcaagctggcgacgttgagcgaagagacctgcctgcaactacggcaggcgcttcccgcgcacattgatattgccaatccgctggatctgtgtgatgacgccagcagcgaacattacgtcaaaacgctggatatcctgctcgccagtcaggattttgacgcgcttatggttatccactctcccagcgctgccgcgccgggtacggaaagcgcccatgccctgatcgagacgattaagcgccaccccagaggcaagcttgttacgctgctgacaaactggtgcggcgagttctcgtctcaggaggcaagacggctattcagcgaagccggattaccaacctaccgtacgccggaaggcacgattaccgcgtttatgcatatggtggaataccggcgtaaccagaagcaactgcgagaaacgccagcgttgccgagtaacctgacgtccaataccgctgaggcgcataatctgttacagcgggcgattgcggaaggcgccgcctcactggatacccatgaagtacagccgattttacacgcctatgggctgcacacgctcccaacctggattgccagcgacagcgctgaagcggtgcatatcgccgaacagataggctatccggtagctctcaagctgcgctcgcccgacattccgcataaatctgaagttcagggggtcatgctttacctgcggaccgcaagcgaggtacaacaggccgcgaacgccatttttgatcgtgtaaagatggcctggccgcaagcgcggattcacggtttgctggtacaaagcatggctaaccgcgccggcgcgcaggagcttcgtgtggtggtcgagcacgatccggtgtttggtcctttgattatgttgggtgaaggcggcgtagagtggcgtccggaagagcaggctgtcgtcgcgctgccgccgctcaacatgaacctggcgcgctatctggtgattcagggcattaaacagcggaaaattcgcgcccgtagcgcgctgcgtccgctggatattgtcggtttaagccaattgctggtccaggtttcaaacctgattgtcgactgcccggaaattcagcgtctggatatccatccgctgctggcttccgccagtgagtttaccgcgctggatgtgacgctggatattgccccgtttgatggcgataacgaaagtcgacttgcggtacgctcctatccccaccagcttgaagagtgggtggagatgaaaaatggcgatcgctgcctgttccgtcctatcctgccggaagatgagccccaactgcgacaattcatcgcacaggtcaccaaagaggatctttactaccgttatttcagcgagatcaacgaattcacccatgaagatttagccaacatgacgcagatcgactacgatcgagaaatggcctttgtggccgtgaggcggatggacaatgctgaagagatcctcggcgtaacgcgcgcgatctccgatcctgacaacgtagatgccgaatttgccgtattggtacgttcagatctcaaagggttgggtttaggacgccgtttaatggagaaattgattgcctatactcgcgatcacggattgaagcggctgaacggtattacgatgccaaacaatcgcggcatggtcgcgctggccagaaaactgggatttcaggtcgatattcagctcgaagagggcatcgtgggattgacgctgaatctggccaaatgtgatgaatcgtgagtaatgtactggaaatgttgaccactttaacgggtactgatgttattattgctcgcttatgtcgtctgcatagcacagaggacccttcaatgaacagagaagaaatgcactgtgatgttgtcaaaatttaagcgtaataaacatcaacaacaccttgcccaactccctaagatttctcagtcagttgatgatgtagatttcttttatactcctgctacttttcgggagacactgctggagaaaatcgccagcgcgacgcagcgtatttgtatcgttgccctgtatctggaacaggacgatgggggtaaaggtatactcgacgcgctctatgcggctaaacggcagcgtcctgaactggacgtgagggtgctggtcgactggcatcgcgcgcaacgcgggcgtattggcgcagcggcctcgaataccaatgcagactggtattgccgactggcgcaggaaaaccccggcattgatgtcccggtttacggcgtaccgattaatacgcgagaagcgcttggcgtactgcattttaaaggctttatcattgatgatagcgtcctgtacagcggcgccagcctgaacgatgtctatctccatcagcatgacaaatatcgctacgatcgctaccagctgattcgcaatcggcaaatggcagacatcatgtttgactgggtgacgcaaaatctgatgaatggccgtggtgtgaatcgtctggataatacccagcggccgaaaagcccggagattaaaaacgatatccgcttataccgtcaggagctgcgtgatgcgtcatatcattttcagggtgacgctaatgacgagcaactctccgttacgccgctggtcgggcttggcaaatccagtctgctgaacaaaaccattttccatctcatgccctgtgcggagcataagctcaccatttgtaccccttatttcaatctaccagcggtgctggtgcggaatattattcagctactgcgcgacggaaagaaagtcgaaatcattgttggcgataaaaccgcgaatgatttttacattccggaagatgaaccgttcaagatcattggcgcgttgccctatctctatgagattaacctgcgccgcttcctgagccgtttacagtattacgtcaataccgatcagcttgtggtgcgtctgtggaaagatgacgacaatacctatcatttgaaagggatgtgggtagatgataaatggatgctactcaccggcaacaatctgaatccccgcgcctggcgtctggatctggaaaacgccattctgatccacgatcctaagcaggagcttgcccctcagcgggaaaaagagctggaacttatccgaacgcacacaaccatcgtaaaacattatcgtgacctgcagagcattgccgactatccgataaaagtgcgtaaattgattcgccgtctgcgccggatccgcatcgacagattaattagtcgtatcctgtaatcgaagccccgtcctgtacggggttttctcttaggagtgaactggtgcgcgtgttgattccttttacggtgttgtttctctccgggtgcagccatctggctaacgaccactggagcggtcaggataaagcccagcattttatggcatcagcgatgctatcggcagccggtaatgagtatgcgcgtcaccagggagtaagccctgaccgcagcgcagcgatagggctgatgttttctttgagtctcggagcctcaaaagaactctgggacagccgcccggaaggcagcggctggagctggaaagattttgtctgggatgtcgctggcgcgacaaccggttacgctatctggcaaatggcgcgatactaaaggcgtaagccctttcctttacggtgcaacatcaacgaaaccaggaaagccagaacggccatcgcggtaacataccagaagaacgaactctccataccgacagattttagcgacagcgcgacatattccgcagagccgccaaataacgcgtttgctaccgcgtaagataaaccgacgcccagggcgcgaacctgcgccggaaacatctctgctttcaggatcccgctaatcgaggtatagaaactcacaatcaatagcgcgcacatcactaaagcaaatgcggcataaggcgacgtcacattctgcaacgcggagagaattggaacggtgaaaagcgtcgcgagtgcgccaaaacatagcatagaggtgcgcctgccaatcttatcggataacgcgccgaataacggctgcacaaacatgaaaacacacagcgcgaccgtcataatgccgctggcgacattggcatgcatacctgctgtatttaccagatatttctgtatataggtggtgaaggtataaaagcacagcgagcctgccgcggtgaaaccaagcaccatcaaaaaggctttgcgattacgccacaaacctttcaacgaaccggcttcttttaatgcgcgagtctcatgcttcgaggtttcatccagctggcgacgtagccataacgccacaaccgccagcacggcgcccagcgcaaagggaatacgccatccccaggcacgaagctcagcatcctccagaacctgctgcaaaatcacaacgaccagcaatgccagtagttggccaccgataagcgtaacgtactgaaacgacgcgaaaaatcccttacgaccttcaagcgcaacttcactcatatatgtcgcgctggtcccatactctccccctaccgagagcccctgaaataaccttgcaataagtagcagcgccggtgcccaggtgccgatggtatcgtaaccaggtaagcaggcaatcaccagcgaccccatgcacatcatgcacaccgaaatcaacattgaggctttgcgcccgcgtcgatcggcaatgcgtccaaacagccaaccaccgataggccgcattaaaaaaccggcggcaaagacgcctgccgtttgcaaaagctgagtagtggtattaccagaaggaaagaagatatgtgcaaaatagagcgagcagaaagagtagacgtagaaatcaaaccattccactaagtttccggaagaggcccccacgatagcccatatgcgtcgccgcatctccggagcctcagcgttatttttatctatacgctgaataatttctgccatactgttctccttgttgccaggcttaatcggccttttattttggagattcagattacgcgagacccaaaagtaaataaagtgttaattatttgtttgctaatttttatccccaccgtgcctgatgctggcgtttccgtttcagatagtcttcgtcctgacggattttatcccaccaacctttgaaaaccgttgccgccgcggccttaataggatcattaccccgtgtattcaggctgccgtcttctgcatactttttaccgcctttatagttagcgtatcgcctggcgcgggtgtatcccatctgaataaatttacgcgccatgtccataccaacgaaatcatcctgctgccggtaagcttcgaacaactggtagacctgttctgcggatttcatcgccgatgcttcatctttatagcgccagaaaggaagaatttcgcttttgtagggttcaaccagtagcaccccctgctcgcctcgtccaacctgatacaattcaggctgctggcggaagtcaatgctggaaaagtcctgctggtagttaaaaggtttgatagccaatgaaaatcctcactgcttatataagcacgtgtaaaggatagttcatcgttaacgattgggtgggatgtactcttgtcggttctacaagaacaccagcttcgtaggggggataattcctgtaggccggataaggcggagccgccatccggcagaaacagacaaaaacaaaaggccctgtcttccgacagggcccttcgttttatttgatgcctggcagttccctactctcgcatggggagaccccacactaccatcggcgctacggcgtttcacttctgagttcggcatggggtcaggtgggaccaccgcgctagtgccgccaggcaaattctttgtgctctgtacgcaattctttatcgcatcagcggcgttgcctgcgctcgtaaactcagtcacatacttctgtatgctccttcctttccttcgcttgccgccttgctgctgcgcaaagtattgcgtactcaactctgaatcactgctgaaaatcgtcttctcatccgccaaaacatcttcggcgttgtaaggttaagcctcacggttcattagtaccggttagctcaacgcatcgctgcgcttacacacccggcctatcaacgtcgtcgtcttcaacgttccttcaggagactttaagtctcagggagaactcatctcggggcaagtttcgtgcttagatgctttcagcacttatctcttccgcatttagctaccgggcagtgccattggcatgacaacccgaacaccagtgatgcgtccactccggtcctctcgtactaggagcagcccccctcagttctccagcgcccacggcagatagggaccgaactgtctcacgacgttctaaacccagctcgcgtaccactttaaatggcgaacagccatacccttgggacctacttcagccccaggatgtgatgagccgacatcgaggtgccaaacaccgccgtcgatatgaactcttgggcggtatcagcctgttatccccggagtaccttttatccgttgagcgatggcccttccattcagaaccaccggatcactatgacctgctttcgcacctgctcgcgccgtcacgctcgcagtcaagctggcttatgccattgcactaacctcctgatgtccgaccaggattagccaaccttcgtgctcctccgttactctttaggaggagaccgccccagtcaaactacccaccagacactgtccgcaacccgggtaacgggtccacgttagaacatcaaacattaaagggtggtatttcaaggtcggctccatgcagactggcgtccacacttcaaagcctcccacctatcctacacatcaaggctcaatgttcagtgtcaagctatagtaaaggttcacggggtctttccgtcttgccgcgggtacactgcatcttcacagcgagttcaatttcactgagtctcgggtggagacagcctggccatcattacgccattcgtgcaggtcggaacttacccgacaaggaatttcgctaccttaggaccgttatagttacggccgccgtttaccggggcttcgatcaggagcttcgcttgcgctgaccccatcaattaaccttccggcaccgggcaggcgtcacaccgtatacgtccactttcgtgtttgcacagtgctgtgtttttaataaacagttgcagccagctggtatcttcgactgacttcagctccatgagtaaatcacttcacctacgtgtcagcgtgccttctcccgaagttacggcaccattttgcctagttccttcacccgagttctctcaagcgccttggtattctctacctgaccacctgtgtcggtttggggtacgatttgatgttacctgatgcttagaggcttttcctggaagcagggcatttgttgcttcagcaccgtagtgcctcgtcgtcacgcctcagtgttaaagtgaaccggatttacctggaacacacacctacacgcttaaaccgggacaaccgtcgcccggccaacatagccttctccgtccccccttcgcagtaacaccaagtacgggaatattaacccgtttcccatcgactacgcctttcggcctcgccttaggggtcgactcaccctgccccgattaacgttggacaggaacccttggtcttccggcgagcgggcttttcacccgctttatcgttacttatgtcagcattcgcacttctgatacctccagcaaccctcacaggccaccttcgcaggcttacagaacgctcccctacccaacaacacacagtgtcgctgccgcagcttcggtgcatggtttagccccgttacatcttccgcgcaggccgactcgaccagtgagctattacgctttctttaaatgatggctgcttctaagccaacatcctggctgtctgggccttcccacatcgtttcccacttaaccatgactttgggaccttagctggcggtctgggttgtttccctcttcacgacggacgttagcacccgccgtgtgtctcccgtgataacattctccggtattcgcagtttgcatcgggttggtaagccgggatggccccctagccgaaacagtgctctacccccggagatgaattcacgaggcgctacctaaatagctttcggggagaaccagctatctcccggtttgattggcctttcacccccagccacaggtcatccgctaatttttcaacattagtcggttcggtcctccagttagtgttacccaaccttcaacctgcccatggctagatcaccgggtttcgggtctataccctgcaacttaacgcccaattaagactcggtttccctccggctcccctattcggttaaccttgctacagaatataagtcgctgacccattatacaaaaggtacgcagtcacacaggtaaacctgtgctcccactgcttgtacgtacacggtttcaggttctttttcactcccctcgccggggttcttttcgcctttccctcacggtactggttcactatcggtcagtcaggagtatttagccttggaggatggtccccccatattcagacaggataccacgtgtcccgccctactcatcgagctcacagcacatgcgcttttgtgtacggggctgtcaccctgtatcgcgcgcctttccagacgcttccactaacacacatgctgattcaggctctgggctcctccccgttcgctcgccgctactgggggaatctcggttgatttcttttcctcggggtacttagatgtttcagttcccccggttcgcctcattaacctatggattcagttaatgatagtgtgacgaatcacactgggtttccccattcgggtatcgccggttataacggttcatatcaccttaccggcgcttatcgcagattagtacgcccttcatcgcctctgactgccagggcatccaccgtgtacgcttagtcgcttaacctcacaacccgaagatgtttcttacgattcatcatcgtgttgcgaaaatttgagagactcacgaacaattttcgttgttctgtgtttcaattttcagcttgatccagatttttaaagagcaaatatctcaaacgtgactcgtaagtcagttttgagatattaaggcaggtgactttcactcacaaaccagcaagtggcgtcccctaggggattcgaacccctgttaccgccgtgaaagggcggtgtcctgggcctctagacgaaggggacgtatcagtctgcttcgcaagacgccttgctatttacttttcatcagacaatctgtgtgagcactgcaaagtacgcttctttaaggtaaggaggtgatccaaccgcaggttcccctacggttaccttgttacgacttcaccccagtcatgaatcacaaagtggtaagcgccctcccgaaggttaagctacctacttcttttgcaacccactcccatggtgtgacgggcggtgtgtacaaggcccgggaacgtattcaccgtggcattctgatccacgattactagcgattccgacttcatggagtcgagttgcagactccaatccggactacgacgcactttatgaggtccgcttgctctcgcgaggtcgcttctctttgtatgcgccattgtagcacgtgtgtagccctggtcgtaagggccatgatgacttgacgtcatccccaccttcctccagtttatcactggcagtctcctttgagttcccggcctaaccgctggcaacaaaggataagggttgcgctcgttgcgggacttaacccaacatttcacaacacgagctgacgacagccatgcagcacctgtctcacagttcccgaaggcacaaatccatctctggattcttctgtggatgtcaagaccaggtaaggttcttcgcgttgcatcgaattaaaccacatgctccaccgcttgtgcgggcccccgtcaattcatttgagttttaaccttgcggccgtactccccaggcggtctacttaacgcgttagctccggaagccacgcctcaagggcacaacctccaagtagacatcgtttacggcgtggactaccagggtatctaatcctgtttgctccccacgctttcgcacctgagcgtcagtctttgtccagggggccgccttcgccaccggtattcctccagatctctacgcatttcaccgctacacctggaattctacccccctctacaagactcaagcctgccagtttcgaatgcagttcccaggttgagcccggggatttcacatccgacttgacagaccgcctgcgtgcgctttacgcccagtaattccgattaacgcttgcaccctccgtattaccgcggctgctggcacggagttagccggtgcttcttctgcgggtaacgtcaattgctgcggttattaaccacaacaccttcctccccgctgaaagtactttacaacccgaaggccttcttcatacacgcggcatggctgcatcaggcttgcgcccattgtgcaatattccccactgctgcctcccgtaggagtctggaccgtgtctcagttccagtgtggctggtcatcctctcagaccagctagggatcgtcgccttggtgagccgttacctcaccaacaagctaatcccatctgggcacatctgatggcaagaggcccgaaggtccccctctttggtcttgcgacgttatgcggtattagccaccgtttccagtagttatccccctccatcaggcagtttcccagacattactcacccgtccgccactcgtcagcgaagcagcaagctgcttcctgttaccgttcgacttgcatgtgttaggcctgccgccagcgttcaatctgagccatgatcaaactcttcaatttaaaagtttgatgctcaaagaattaaacttcgtaatgaattacgtgttcactcttgagacttggtattcatttttcgtccgaggacgttaagaatccgtatcttcgagtgcccacacagattgtctgataaattgttaaagagcaggtgcgacgcggcttacagctcaccgtcgcgaggtggcgtatattacgctttcctctttttgagtcaagcctttattttcgctttcctcacaggcttcttaacgaagcctttctgacccggcggcctgtatgccgttgttccgtgtcagtggtggcgcattatagggagttattagagcctgacaagacctaaatgcaaaaaaaagctcaaccgttcacttttcaaacaacatttgaaccaaaagcctattttcgcctggtttttaaacaaaaacgagcccgtcagggcccgttttattcaaatttgtgacttactgcactgccacaatacgatcatcactggcttcaaggcgaatcactttgccaggaaccagttcaccagacaggatttgctgcgccagtgggttttcgatctgctgttgaatagcacgttttaacggacgcgccccgtagaccggatcgtaaccgttggcgctcaacagtttcagcgcctcgtcggagatatggatttcataaccacgttcttccagacgtttgtacagacgctgcagctggatctgagcaatagaagcgatgtgttgctcacctaacggatggaataccacaacttcatcaatacggttgataaattccggacggaagttttggctaaccacacccagcaccatctctttcattcgaccgtaatccagttcgccaaagcgctcctgaatgagatcggaaccgaggttagaagtcataatgaccaccgtattacggaagtcgaccgttctcccctgcccgtcagtcagccgaccgtcgtccagcacctgcaacagaatgttgaatacatccggatgcgctttttctacttcatccaacaagatgacggaataaggacgacggcgtaccgcttccgtcaaataaccgccttcttcatagccgacatatcccggaggcgccccgaccaaacgagacacggagtgtttctccataaactcggacatatcgatacgcaccatcgcgtcgtcgctgtcgaacataaagttagccagcgctttacacagttcggttttaccgacccccgtcggccccaggaacaggaaggaaccaatcggacggttcggatcggacagcccagcacggctacgacgtatggcgttcgatactgcttcaacggcttcattctgcccgatcacacggctgtgtaactcttgttccatacgcaacagtttttcacgttcgccttccagcattctggcaaccggaataccggtccagcgcgccagcacttcggcaatttccgcatccgttactttgttacgtaacagacgcatggttttaccttccgactgggtcgcggcttccagctgtttttccagctccggaattttgccgtactgcagttcagacattcgcgccaggtcgccaacgcgacgcgcctgctcgatggcgatcttcgcctgctccagctccgctttaatagtttgcgtcccagaaagcgatgctttttccgctttccactcttcttccagctcagagtactgacgctctttatcgtccagttcttcgttgagcatatcgagacgttttttactcgcctcgtcagactctttcatcaacgcctgctgttccagtttgagctgaataatccggcggtcgagtctgtccagctcctccggcttagagtcaatctgcatacgaatgctggatgccgcttcatcgatgaggtcgatagctttatccggcaactgacggtcggcgatatagcggtgagataatgttgccgccgccacaatcgccgggtcagtgatctgcacatggtggtgcagctcgtaacgttctttcaggccacgcagaatagcgatggtgtcttccactgaaggttctgcgacaaacactttttgaaaacgacgttccagcgccgcgtctttttcaatgtactgacggtattcatccagcgtggtggcgcccacacagtgcagttcaccacgcgccagcgccggtttcagcatattcccggcgtccatggcgccatcagccttacctgcgccaaccatcgtgtgcagctcgtcaataaacaggatgacgttgccttcctgtttcgccagatcgttcagcacgcctttcagacgctcttcaaattcgccgcgatatttcgcccccgccaccagcgcgcccatatccagcgccagtacgcggcgaccttttaagccttcagggacttcaccgttaataatgcgctgcgccagtccttcaacaattgccgttttaccgacccctggctcaccgattaacaccgggttgtttttggtacgacgttgcagtacctgaatggtacggcgaatttcttcatcacgaccaattaccgggtcaagcttgccttgttcagcccgctcggtcagatcgacggtatattttttcaaggcctgacgttggtcttcagccccttgatcgttcacgctttcacctccgcgcatctgttcaattgcctgagtgatattggccgtggtcgcaccggctgatttcagcagatcggttaacgtgccgcgagactcaagcgccgccagaacaaacagctctgacgaaataaaattgtctccccgtttttgcgccagcttgtcgcaaaggttcagtacgcgtaccagttccgaagaaggctgtacgtcgccgccggtgccttccacctgcggtaaacggctcagcgcctgatcgatagcggtgcgcaactggccagcattaatgccggcggaggttaataaaggacgtatcgatcccccttcctggttcagcaaggcgctcattaaatgaagaggttcgatgaattggttgtcgtgccccagcgcgagcgactgggcatcggcaagagcaagctggaatttgttagtaagacgatccagacgcataactcctcccataacaggtcaaaattgctactggagattaaatgaggtcatccctcaattattcaaggtgaatgacctgaattatgtgaaaagaaagttacccgtaccggatcgtcttgattctttaggttatatcagccaaataaaacttgccatacgacctgtcgtcttgtcgcgacgataagagaagaaagtctcactttcgctaaaggtgcagcgatccccgccatagacatgttcaacgccggtattcgccagacgttggcatgcaagctgataaatatccgccagaaatttttccccgtgcggcaaaaatgcgctatcggcttgcgcatcttttgctaaaaatgcgtcacgcacttccggccccacttcaaacgcggtcgggccgatcgccggacctaaccaggcgatgatattttctggtttgtcagcaaagcaggtgacagtttcctccagtacgccttcacataatccgcgccagcccgcatgagccgccgccacttctgttccctcacggttacagaatagcacaggcaggcagtctgccgtcattaccgcgcagacggttcctggcgtattgctgtaagacgcatccgcacgtttggaggcataaggttctccggtaagcctcaacacatttttaccgtgaacctgttcaagccagacaggtttcgaaggcagattgcccgccgcaaacagacgcttgcggttctcttcaacatgctccgggttatcgccgcaatgcgcgcccagattcagcgagtcgtaaggcggtaaactcaccccgccaatacgggtagaactacaggctgcgacgcctttcggcagcggccactgcgggacaatcagtgcattcataaccagtccacatcatctttatgatcttcaaaatcggcgcgcatcgcatcgataaggtccaccatatcttgtggaatcggcgcgtgccactccatttcgatacccgatacaggatggtagagacgcagcattgttgcatgcagcgcctggcggtcaaacttacgcagcgtggaaataaattcttccgatgcgcctttcggtggacgtggacgaccaccgtagacctgatcgcccactaacgggtgcgtaatatgcgccatatgcacgcggatctggtgcgtacgcccggtctccagacgcaacctaagacgcgtgtgcacacggaaatgttccataatgcggtagtgggtcaccgccggtttgcccatgggatgcaccgacatatgggtacgtttggtcgggtgacgactgatgggttcattcaccgttcctcccgccgtcatatgtccgatcgcgaccgcttcatattcgcgggtgatctcgcgcagctgcaaagactccaccaggcgcgtttgcgccggaacggttttggccaccaccatcagccccgtcgtgtccttatccagacgatgcacaatgcccgcgcgcgggacatccgcaatcggcggataataatgtagcaacgcgttcagtaccgtaccgtccgggttacccgcgccaggatgtaccaccagatcgcgtggtttgttgataaccagaatatcgtcatcttcataaacaatatctaacgggatatcctgcgcttcaaaacgaatctcttcgtcgatctccgcatcaatagccacccgctcgccgcctaacactttttcttttggcttatcgcaaagttgaccattgaccaacacgcgctgattcaaaatccattcttttatacgcgaacgtgaataatccgggaacatttcggccaaagcctgatctaagcgttgaccgagttggttttcggagaccgttgcggtgagttgtactcgttgtgccatatacagcttcttcgtttaacgttgggttttacggctttgccgtttaatatagtgtgctattgtagctggtcttaaccgggagcaggaacagagaatctcccgtaaaacattttgaggaaagtcaaaacgtcatgacgcgcatgaaatatctggtggcagcagccacgttgagcctgtttctggcgggttgctcgggttcaaaggaagaggtgcccgataatccgccgaatgaaatctacgcgactgctcagcaaaagctgcaggacggtaactggaaacaggcaataacgcaattggaagcgttagataatcgttatccattcggaccgtattctcagcaggtgcagttggatcttatctacgcctattacaaaaacgccgatttgccgctagcgcaggccgccatcgatcgttttatgcgtcttaatccaacgcaccctaatattgactatgtcatgtacatgcgcggcctgacgaacatggcgctggatgatagcgcgctgcaaggtttctttggcgtcgatcgcagcgatcgcgatccgcaacatgcgcgggcggcgttcaatgacttttcgaaactggtacgcagctatcctaatagccagtacaccaccgacgccactaagcgtctggtattcctgaaagaccgtctggcgaaatatgaatattccgtcgcagagtactataccgcgcgcggcgcatgggttgcggtcgtaaaccgggtagaaggtatgctacgcaattatcctgatacgcaggccacgcgcgatgcgttgccgctgatggaaaacgcctatcgtcagatgcagctgaatgcgcaggctgacaaagtcgcgaaaattattgccgctaacagcaaaaacacctgaagcaataccaacaagcaaaacggcagccttccggctgccgtttttttattcgatatctgatgcaacagaaatgatttcactgcaacgcatccagtcaaatatggcctgctttcagccattcctcaagtaaaagatcgcttcttcctgcgatgcctcacaaaaagttcgccttgacaaaaagtgacaaaataatgtgatttacatcacacattttgacattaagaacggtatgctggaatcaccaagacgggaaagacaagaggtaaaatttatgacaatgaacattaccagtaaacaaatggaaattactccggcaatccgccaacatgtcgcagaccgtctcgccaaactggaaaaatggcaaactcacctgattaatcctcatatcattctgtctaaagagccacagggctttattgctgacgccaccattaatacaccgaacggacatctggtcgccagcgcaaaacacgaagatatgtacaccgctattaatgaattgatcaacaagctggaacggcagctcaataaagtgcagcataaaggcgaagcccgtcgtgccaccgcatcggtgaaagatgccagcttcgtcgaagcagaagaagagtagtcccttacattgagtgtatcgccaacgcgccttcgggcgcgttttttgttgacaggattaaaacagtacgggtactgtacttacgtacacaaaggaaacagttatgaagctaacccggtttttcttcgcattcttttttatcttcccctgactgggaggcgtttcgtcatgtgataaagaatgcgaagacgaacaagaaggcctcccccaccgggaggccttttttattgataacaaaaaaggcaacactatgacatcggaaaacccattactggcgctgcgagataaaatcagcgctttagacgaagagttactggccttactggcaaaacgacgcgcgctggcgattgaagtgggacaagcaaaactactgtcgcatcgtccggttcgggatatcgatcgtgaacgcgcgctgctggacagactcatccatctcggtaaagcccaccatctcgacgcacactacattacccgtctgttccagcttatcattgaagactccgtgcttactcagcaggcgctgctgcaacaacatctgaataatactcaccctcattcggcacgtattgcgtttcttgggccgaaaggctcctattctcatctcgcggcgcgccagtatgctgcacgccattttgagcaatttattgagagcggctgcgcaaaattcgccgatatttttcatcaggtcgaaaccggccaggccgattacgccgtggttccgatagagaacaccagctccggcgctatcaacgatgtgtacgacttattgcaacacaccagtctgtcgattgtcggtgagatgactgtcactatcgatcactgcgtgctggtttccggcgctacagatctgaataccatcgaaacggtgtacagccatccgcagccgtttcagcagtgcagtaaatttttgagccgctatccgcactggaaaatcgactataccgagagtacgtcggcagcgatggaaaaagtcgcgcaggcaaactctccgcgcgtcgcggcgctcggcagcgaggcaggcggcatgttgcacggtttacaggtgctggaacgcattgccgcaaaccagacgcagaatatcacccgctttctggtactggcgcgcaaagccatcaacgtttccgatcaggttccggcaaaaaccactctgttaatcgccaccgggcagcaagctggcgcgctggtcgaagcgctgctggtgctgcgtaaccacaatctcatcatgacgaaactggagtcgcgccccattcacggcaatccgtgggaagagatgttttatctcgatattcaggcgaacctggagtcgcaggtaatgcaaagcgcgctaaaagagctgggcgagatcacgcgctcaatgaaagtgcttggctgctatcccagcgaaaacgtcgtgccggtagaacctgcctgacgttcaataaaacggcttttcttcatccctgcgacggctacctgcagggtgaagatggcgccggagagcggataatccgccacttcctgagcagacatattttctctggtagttgtaataaacagcgttttcatatctgcgccgccaaagcaaaccatcgtcggacaacgtaccggcaaccggtactcttccagctgctctccttgcggtgagaaacgcgccacgcaccagccgtcaaacatcgcgctccagtagcacccttcgctatccatcgccgcgccgtcgggaagtccttctccttcgccaaaatggcgaaaaagttcacgcttgcccggatcgccatgcttatcaagtaacgtgcggtatatcacgccattcggcgtatcggaggtatacatccactggttatccgggctgaacgccaggccgttgtgtccctggatatcgcactggatcacttttgccgtcaggtcatgatcgatccgcatcagcaacgcgccattatagtcacctggcgcccagaacgttccggcataaaaacgtccatcgccatcagtgccgccatcgttgaaacgcgccagtttcgtattagagggattgtcgcaaaccttacgctgcaataatccatttttatcggccagccagatagcatgacgcatggccacaataaatccgccctgctcacgcaaggcaaaacagcccacctcttccggaaacgccagcacgctatgcgtcccgctcgccggatggtaacgatggatctcctgttccaggatatcggtccaatacagcgcgctttcatcctcgctccatgtggggcattctggtaaatgtccggcataatcaaataaaacgtgcggcgtagtcataacggttccttaaacgaaaaaagccagcaaagctggcttttagtatagatgtcatcattatggtcggctgtcattcgcctgacgcaataacacacggctttcattctggaagcgtctggcataatcgccaaaccagtgttcaactttgcgaaaactgtcgataaaagcctgcttatcaccttgttccagtaacccgatcgcatcgccaaaacgtttatagtaacgcttgataagcgccagattgcgctccgacgacataataatgtccgcatacagctgcgggtcctgggcgaacagacgcccgaccatcgccagctccagtcgataaatcggcgatgatagcgccagaagctgctcaagctggacgttctcttccgccagatgcagcccataagcgaaggtagcaaaatggcgcaacgcctggataaaagccatgttctgatcgtgctcgacagcgctaattcggtgcaaccgagcgccccacacctggatttgctcaaggaaccactgatacgcttccggttgacgcccgtcacaccagaccaccacctgcttcgccaggctcccgctgtccgggccaaacatcggatgcaagcccaacacggggccatcatgggccgccaacattgcctgtaacggatcgcttttcaccgatgccagatcgaccagaatacagtcggacggcaggggcggcagttgcgctatgacctgttcagtaacatgaatcggcacgctgacgatcaccattccggcatcggcgacaatgtccctggcgcgcggccagtcctgctgttccagaatacggacctgatagcccgacagcgtgagcattttttcaaacagacgccccatctgtccgccgccgcccacaatgacgaccggacgcagagaaggacaaagcgttttgaaccccttatcattttcgctggagtaagattcacgcattacccggcgcaggacatcttcaatgagatcgggcgggacaccgatcgcttctgcttccgcccgtcgtgaagccagcatagaggcctcacgctccggcacgtaaataggcaggccaaaacggcttttcacctcgccgactttggcaaccagttccaggcgcttagccagtaaattcaacaacgctttatcgacatcatctatttgatcgcgtaacgcggtcaattcagcaaccataacaacctcttatgcgacgcgcaccgccagctggccgctcaaatctttatgaatttcacgtaacagggcatcggtcatctcccagctaatacaagcatcggtgacggaaacgccatacttcatttcgctgcgcggctgttcggaagactgattaccctcatgaatattactttcaatcattaagccaatgattgaacgattgccatctttaatctgcgcaaccacagattcggcaacggctggctggcggcgataatctttattggagttaccatgactgcaatctaccatcagcgaaggacgtagtcccgcctgttccatctctttttcacactgagcgacatctgccgggctatagtttggcgctttgccgccacgcaaaatcacatggccatgcggatttccctgggtttgcaataacgcaacctgaccggcctggttaatgccaacaaaacgatgaggttgcgcagcggcgcgcatggcgttaatcgctgtcgccaggctgccatccgtgccgtttttaaagccgaccggcatagaaagaccagacgccatttcgcggtgggtttgcgattcggttgtgcgcgcgcctatcgccgaccagctaaacagatcgcccaggtattgcgggctgttcggatccaacgcttcggtcgccaatggcaaccccatattcaccagttccaccagtagctgacgcgctattttcaacccggcttccacatcaaatgagccatccatgtgaggatcgttaatcagccctttccagccgacggtagttcgcggcttttcaaaatagacgcgcattaccagatagaggctatcgctgacctctgcggcaagggctttaaatcgacgggcatattccagagcggtttcaggatcgtgaatagaacaaggaccgcataccaccaacagacgcggatcgcgcccggcaataatgtcagaaatgattccccgggactgcgctatctgcgcttcctgcgccaggctcaacggaaaggccgctttaagctgctccggcgtcattaatacctgttcatcggtgatacgtacgttattcagcgcgtctttttgcatgatggcgatcctgtcttttcttgtttgcgatagttgatcctccacgaggatgtttaaaccataccacaaaaagtaaagatttcaatccatattacgtaaaataaactttacaccatgcgcaatcgtcgattaaccccctccatttcgtatcaaaaactttacacaacaagtgaattattttattcccagcctcagaaaaacggtaaaatgagcgatgctcgctattttttgattattttttctccgcacacatatttttactttctgatataggttgattaataccattatcacaagaatttaatatcagggacgccacttaaattattcatattatcaataagacataatgacgatatggcaaaataatgttattttgctacaaacaatcacggatgtattttaatgctttacgactgaagatggtggggacttgttaatgcgtttttctcaccgatttatccttctgttatcgctattattagcaagcttgcctctgtatgctcaacgcgtcacggaagaagagaaatccgtacgcgccatcgtctccggtatcgtcagttatacacactggccggcgttatccgggccgccaaggctatgcatattttcatctgcgcgttttgtcagggtacttagcgaagaggctgattgggctttcccttatcaaccgcttgtcatccgtaccacacaagaagccctgagcgcccgctgtgatggtttttactttggcaatgaatcgccagcttatcaggtggagttaacgcgtcattatccagttaatgccttgttattaattgccgagcaaaataccgaatgtattattggcagcgcattttgtctgatcattaacaatgatgaagtcaaattttccgtcaacctggactccctctcgcatagcggcgtgagagtaaatccagaagtattaatgcttgcacggaatcaaaagcatgaataaggaattttctctgtccagaccaacatttaaacgcacactacggcggattagtataatcagcgtgctgcttacaatgacattgatctggctattaatttgcgttgcgtctgtccttacgctcaaacagtatgcgcaaaaaaatctcgatttgaccgccgccacaatggcccatagccttgaagcggcactggtattttccgataacgcggccgcagcggaaacgctcgccacactgggacgccagggacaattttcagcggcggaggtccgcgataaaaatggccgtactatcgcctcatggcgctatgatgcgcgagccgcagacgataagctcatcggcttaattagccactggctttttccattgccggtatcacaacccgtctggcacaacggcagggccatcggcgaagtacggcttgtcgcccgcgacagccttattggtcattttatctggctatcgctggcagtgctgacaggatgtattctgctggcatccggcattgccctgctgctcacgcgttatttgcacaatggcgttgtggatgcgctgcaaaatattactgaagttgtacacgacgttcgcactaaccgaaatttttcacgccgggtacctgatgagcgtattgcggaatttcacctgtttgcgcaggatttcaatagccttctggatgagatggaagaatggcagctacggcttcaggctaaaaatgcccagttactacgtaccgcgctgcacgatccgctgacggggcttgccaatcgcgcggcatttcgcagctgtattaacgcgctgatgaaggacaattccgctcgtagcagttcggcattgttatttctggatggcgataactttaaatatattaatgatacctggggacatgcggcaggcgaccgcgtacttatagaggttgccaaaagattagcggaattcggtggtagccgttatcaaacttaccgactcggcggcgatgaatttgcgatggtgctttacgatgtacattcggagtatgaagtacaacgtatttgcgcagcgctatcccaggcgtttaatcgaccttttgaactgcataacggccagcggataacgatgaccctgagtattggctttgcgctgacatgggaacatgccactgccgaaaaactacaagaactggccgatcgaaatatgtatcaggctaaacaccggcgtgcggaacgctcgctaaattaaggaacgggcctggccgtttctgactcagcgttgagaccacagacccagcctaatcatgcaaccgtccatggcgtggagcaaccccataaaaaaggggccagcgtaatgccagccccttcttttctacaagctttcggatgttgcgaaagcgcgttcttagttaagacgctctttgatacgagccgctttaccagtacgctcacgcaggtagtacagtttagctttacgaacagcaccacgacgtttaacagcaatgctgtcaactaccggagagtgagtctggaagacacgctcaacgccttcgccgttggaaattttacgaacagtgaatgcagagtgcagaccgcggttacgaatagcgataaccacgccctcgaatgcctgcagacgtttcttggtaccttcaacaacccatactttcacttccacggtatcgcccggacggaaggaaggtacgttctgcttcatctgctcttgttcaagttgcttaataatgttgctcataatttaatctcttatcctgggtaaactgatattcgggggcctatgccatcccatcatgtttatgctgctgttgtgcgtgttctgttttgaactccgccagcaaccttgcttgctcttcagtcagagccaggttttccagaagttcaggtcttctaagccaggttcggcccagcgactgtttcaagcgccagcgacgtatctcggcatggtttcccgacagcaatactggcggtacttccatcccctctaacacttcagggcgcgtatagtgcggacaatccagcaacccatcagcaaacgaatcttcgattgctgatgcctcatgccccagaacccccggtataaaccgggcgacggagtcaatcagcgtcattgccggtagttcgccaccgctgagaacgtaatcgccaattgaccattcttcgtcaatttcggtctgaattacgcgctcatctacgccttcgtagcgaccacacaccagaataagcttctgattcgtggccagctcgctaacgcccgcttgatcaagcttgcgtccctgaggcgacagataaatcactttagcgccttcacctgccgcggcttttgctgcgtgaatggcgtcccgcaagggttgcaccatcattaacatccccggtccgccgccgtaaggacggtcgtccacggtacggtgccggtcatgcgcgaagtcgcgaggactccagctttggatgttcagcaggcctttttttactgcccggccagttaccccgtaatcggtaattgcgcggaacatttcaggaaacaggctaacgatgccaataaacacaagccaatccccataacgccatttattaccgtttattcggtggtttaaaaaccaggatcccagtctacttcgatagtacgagtagcgagatcgactttcttgataacctgcccatcgaggaacggtactagtcgttccttgataccaaatgcatctttcaggttcgccttaatgacgagaacgtcattcgacccggtttccatcatgtcgataactttaccgagatcgtagccttcagcggtgactacctggcaacccatcaggtctttccagtaatagtctccctcctcaagcgcaggaagttgcgaggaatccacgacaatttcgcaattggtcagaagattcgcggcatctcgatcgtcaacgcctttcagcttgatgatcagatcctgattgtggtgcttccagctttccagctgtacctgctgccactgacccgccttctggataaaccagggctgatagtcaaaaatgctttcggcgtcttcagtggaggaaaacactctgagccaaccacggataccgtatgaagaacccattttccccagtacaaccggttcagcgggtacttgtgcggcgagttgcttgctcatcatgaccaccgtgacagattaagctgctttttttacttctttgatcagcgccgcaacgcgatcggaaatggttgcgccctggccaacccagtgagcgatgcgatccagatccaggcgggtgccttcttctttttcgctagcgattgggttgaagaaaccaacgcgctcaatgaagcgaccgttgcgtgcattacggctgtcggtgacaacaacctggtagaacggacgctttttagcgccgtgacgagctaaacgaatagttaccataacatcctcttgtgtgaataaaacaaccgggccccatcgaggaacggagcccggcgtcatattaaaagcccgaaaattttactgatttctgggagaattgcaatcaacagttaataactctgctgtagaaggccgtcggcggcgcagcgagttcggtgccggcgtgcgcgcagccaccgcagcgtacacgcagtacgtgaggatggcgagcacaccccggtgccgaaatagcaagtgagccaggccgggaaattagcgacccgggaagcctggcggcatcatccccttcatactgcgcatcatcttcgccatcccgcccttcttcatcttcttcatcatgcgctgcatgtcgtcgaactgtttcagaaggcggttaacgtcctgcacctgcatcccacagccctgcgcgatacgacgcttgcgggaacctttgatgatttccggcttcgcgcgctctttcagcgtcatcgaattgatgatcgcttccatacgcaccagcaccttgtcatccatctgcgatttaacgttgtccggaatctgccccatgcccggtaatttgcccatcagactggccataccgcccatgtttttcatctgtttgagctgttccaggaagtcgttcaggtcgaaaccgtcgcctttcttcagtttagtcgccagcttttcagcctgtgcgcggtcaactttgctttcgatatcttcgataagagacagtacgtcgcccataccgagaatacgcgaggcgatacgatccgggtggaacggttccagcgcgtcggttttctcgccgacaccgaggaatttaatcggcttgccggtgatatgacgaatagagagcgccgcaccgccacgagcatcaccatcaactttggtcagcaccacgccggttaacggcagcgcttcgttaaaggcttttgcggtattcgccgcatcctgaccggtcatcgcatcgacgacaaacagcgtttctactggcttgatagaagcgtggacctgtttgatttcgtccatcatcgcttcgtcaacgtgcagacgaccggcggtatccaccagcagcacgtcgtagaatttgagcttcgcttctttcagcgcggcgttgacgatatcaaccggtttctggccgacatcagacgggaagaaatccacgccaacctgttcagccagcgtttcgagctgtttgatcgccgccgggcgatagacgtcggcagagacgaccagcactttcttcttgtgcttctcgcgcaagaatttacccaacttaccgacgctggtggttttacccgccccctgcagacccgccatcaatactacggctggcggctgcgcagctaaattcagcgtctggttctcttcgcccatcgccgcaaccagttcgctacggacaatcttgacgaactcctgccctggggtcaggctcttgttaacttcatgaccaaccgctttctcttttacgcgattgatgaactcacgcactaccggcagcgcaacgtcagcctccagcagcgccatgcgcacttcgcgcagcgtctctttaacgttgtcttcagtaaggcgcccacggccactgatattgcgcagcgtgcgcgacaaacgatcggttaaattatcaaacattgtctctcgcctggggtggaaacggttggtcgccgcagcgacacagttacagaatttcgccacagtataccatgaagccgtctttgttgttatgcaacggttggagctgcggtcacgtaacgctatactgcttctctttctcactggtcaactgtcgacacaactatgcccgtttttgctttacttgcccttgtcgcctactccttcagcctcgcgctgatcgttcccggactgttgcaaaaaaacagcggctggcggcgtatggctattctttctgcggtcatcgcgctggtgtgccatgctgtcgcgctggaatcgcgtattctgcccggcggcgacagtggacaaaacctgagcctgctgaatgtcggttcgctggtcagtctgatgatctgcacggtgatgaccattgtcgcgtcgcgtaatcgcggctggctacttctgcccattgtctatgcttttgcgctgattaacctggccttcgccacgttcatgcctaatgaatatattacgcatctggaagcgaccccaggcatgatggtgcacatcggtctgtcgcttttctcttacgcgacgctgataatcgccgcgctgtatgcgctacaactggcgtggatcgactatcagttgaagaacaaaaagctggcgtttagtaatgaaatgccgccattgatgagcattgagcgcaaaatgtttcatatcacgcagattggcgtcgtactgctgacccttactctgtgtaccggcctgttttacatgcataacctgttcagtactgaaaatattgataaagccgtgctctctattgtggcatggtttgtctatatcgttctgctgtgggggcattaccatgagggctggcggggtcggcgggtcgtgtggtttaacgtcgcaggcgcgggtattctgacgctggcctattttggtagccgcatattacagcaatttgtaagctaagcttttaaaggagtttcccctggaacacatctccaccaccacgctgattatcatattaatcatcatggtggtcatctcggcctatttttccggttccgaaactggaatgatgacgctaaaccgttaccgtttacgccatatggcgaagcaaggtaatcgctcggcaaaacgggtagaaaaattactgcgtaaacccgaccgactgataagcctggtgctgatcggcaataacctggtcaacattcttgcctcggcgctcggcacgattgtgggtatgcggctttacggcgacgctggcgtggctatcgccaccggggtactgacgtttgtcgtgttagtttttgccgaagtcctgcccaaaactatcgccgcgctctatccggaaaaagtggcctatcccagcagcttcctgctggcgccgttacagatactgatgatgccgctggtgtggttacttaacaccatcacccgcctgctgatgcgtctgatgggaattaaaacggacatcgtggttagcgggtcgttaagcaaagaggaattacgcactatcgtgcatgaatcccgttcgcaaatctctcgccgcaatcaggatatgctgctgtcggttctcgacctggaaaaggtcagcgtggatgacatcatggtgccgcgtaatgaaattatcgggatcgatatcaatgacgactggaagtctatcgagcggcagctcacccactcgccacacggacgcattgtgctctatcgcgattcgctggatgacgccatcagtatgctgcgcgtgcgtgaagcctggcggttaatggccgagaaaaaagagttcaccaaagagatgatgctgcgcgccgccgatgaaatctattacgtcccggaaggtacgccgctcagtacacaactgattaaatttcagcgcaataaaaagaaagtcggactggtcgtcaacgaatatggcgatatccaggggctggtcaccgtggaagatattctcgaggagatcgttggcgacttcaccacatcgatgtcgccgaccctggcggaagaggtcacgccgcaaaacgacggttcggtcattattgacggtaccgccaacgtccgggaaatcaataaagcgtttaactggcacctgccggaagacgacgcgcgcaccgtcaacggggtgattctggaggctctggaggaaattccggttgctggcacgcgcgtgcgcattgagcagtacgatatcgatattctcgatgtacaggaaaatatgattaagcaggtaaaggttgtaccggtaaagccgctgcgcgagagtgtggcggagtaacacaatggcgaactccggttcgccttttttatcgccgtcttttaagattccatcaattcctgccatttacttaacaatgcaataatgtcttttcaggcattcagaaaggatattgatgttatgtcagaagattatgtaattgaatgggataagaattttgcagacgacctcaacgtcgtcgccaacgtttttttatcacacaacccaaccttatggcccactattttctctcaactttcgacgcaacctgaaatctttgaagacgaagatgaagacgaatatgggttgcaggacgtcctggattgtagcggtggcgatctcggaaataacgagctggcacaggcatttttacaagttctacgcggcgaaagatttattcacctcgttgactggaaaggtgaagatgaagaaggcgaactggctaattttgccgcagatcgcttttatgaactcacaaaaaacctgacgaattctgaggaattaagaaatcttcttgtcgaaataacccaagaggatgaaatctccgatgtctgtgaagccggagaccgttaccttgacgagatctttgaacgcatccagaccgaactcaataagaggggcttccagatttttgatctgaatgaaggatctgacacctataatgtggtcgttctgccaatgagcgaatataaaaaaatagaggacttcaacacgccgtggctggaagtgcaggattttttaagctaaaaaaatggccgactttacatcggccatcagacttttacttcgccttcgctacagtcaccatcgccgcgcgaatggtacgaccgttcagcgtatagcctttctgcataatacccagcacattgcctgccggaacctcttccgactccaccatcgcaatcgcctgatgcacgttcgggtccagcggcacgttggtctcagcaatcacttccacgccgaacttacgcaccacatccagcatagacttcagcgtcagctcaatcccttcgaccattgccgccatatccggattggctttgtctgcgacttccagcgcgcgatccaggctatcgatgaccggcagcaattcgttgacgaacttctcgagagcgaatttatgcgctttttcgatatcctgttcagtacgacggcgcaggttttccatttccgctttgatgcgcaacacggtgtcgcgttcgcgagtctgggcttctgcaagctgaacttccagattcgcaattttttcatcgcgcggatccacctgctcagcagaatcgtttggttcaactgcctcaacctcttcgtgctgatccatgataatttcttccggggcttgcccctcaggcgttttctgttctttactactcatgaatttctccgcgttttttttcgcattcatctcgctaacttcgcttattatggggatcagattcagggtttcaagggaagtactcacattgtcatcaatcttcgctacaaggacctcagaaaaatgaataatcatttcaagtgtatcggcattgtggggcatccgcgtcatcccaccgcactcacgacacatgaaatgctctaccgttggctatgcgctcagggttatgaggtcattgtggagcaacaaatcgcccacgaattacagctaaaaaatgtgccaaccggcacgctggcggaaattggtcaacaggcggatctggcggtagtcgtgggcggcgacggcaatatgcttggcgcagcgcgtacgctggcgcgttataacatcaatgtgattggcattaaccgcggtaatcttggcttcctgaccgatctcgatccggacaacgccctgcaacaattatctgatgtgctggaaggacgctatatctccgaaaaacgttttctgctggaagcgcaggtctgccaacaggaccgccagaagcgtatcagcacagccattaatgaagtggtgctgcatccgggaaaggtggcgcatatgatcgaattcgaggtttatattgatgaaaccttcgctttttcacagcgatctgatggtctgatcatttctacgccgaccggctccaccgcctattcgctctccgcaggcggccctattctgaccccttcactggatgccatcaccctggtgccgatgttcccgcataccttgtcggcgcgcccgttagtcattaacagcagtagcacgattcgtttgcgtttttcgcatcgccgtagcgatctggaaattagctgcgacagccagatagccctgcctattcaggaaggagaagatgtgctgattcgccgctgcgactaccatctcaacctgatacatcccaaagactacagctatttcaatacattaagcacaaaactcggctggtcaaaaaaattattctaattttacgttagcctctttactgtataaaaaaccagtttatactgtatttaattacagttatggtttttcatacaggaaaacagctatgttggcgcaactgaccatcagcaattttgctatcgttcgcgagcttgagatcgattttcagagcggaatgaccgtcattactggtgaaaccggcgcgggtaaatctattgcgattgatgccctgggtctgtgtctgggcggtcgcgctgaggccgatatggtccgtaccggagcgacccgcgccgatttgtgtgcccgctttgcgctgaaagacacgcctgcggcattgcgctggctggaagaaaaccagcttgaagaaggtcgcgaatgcttacttcgccgcgttatcagcagcgatggccgctcacggggctttattaacggcaccgctgtgcccctgtctcaattgcgcgagctcggtcagttgctgattcaaattcatggtcaacatgcgcaccagcagcttaccaaacccgaacagcaaaaatcgctgctggatagctatgccaacgaagccgctttagcgcagcagatggctgcccgctaccaattatggcatcaaagctgccgcgatcttgcccatcaccagcaacaaagccaggaacgcgccgcgcgcgcagaactgctgcaatatcagttaaaagagttgaacgactttaatccgcaggccggtgaattcgagcaaattgacgaagagtacaaacggctggccaacagcgggcagttgcttacgaccagccagaacgctctggcgctactcgcggacggcgaagacgttaacctgcaaagccagttatatagcgcaaaacaactggttagcgagctggtaggtatggacagcaagctttccggcatcctggatatgctggaagaagccactatccaactcaccgaagccagcgatgaattacgccactattgcgagcgtctggatttagaccccaatcgcctgtttgagcttgaacagcgcatcgctaaacaaatttcgctggcgcgaaaacatcacgtcagcccggaagcgctgccgcagctttatcagtcactgctcgaagaacagcagcagctcgacgatcaggccgattcgctggaaacgctaacgctggcggttaataagcatcaccaacaagcgctggaaacggcgcaagcgctgcatcaacagcgtcagttttacgcccaggagctggggcagttgatcactgaaagtatgcatttactttcgatgccgcacggtctgtttactatcgacgtgaaatttgatgagcatcatctgagcaacgacggcgccgatcgcgtggagtttaaagtgacgacaaacccgggtcagccgctgcagcctatcgctaaagtcgcgtctggcggtgaactgtcgcgcattgcgctggctattcaggtgattaccgcgcgcaaaatggaaacgccggcgctaatttttgacgaggtcgatgttggcatcagcggcccaaccgccgccgtggtcggtaaactcctgcgtcagcttggcgaatccactcaggtgatgtgcgtcactcacctgccacaggtagccgggtgcggtcaccagcacttctttgtcagtaaagaaacagacggggcaatgaccgaaacccatatgcaaccgttggataaacgtgcgcgtttacaggaactggcccgcctgttgggaggaagtgaagttacgcgtaatacgctggcaaacgcaaaagaactgctggcggcgtaaacttttttatctcccgaaggtctgagttcacaacaaaaacgccgtaagacccgacagcaaaaggttttaaagtgatgaaaggtctattatcatcggcatattaatatgagccacgtactgctcaggcccgaaaaggaacccaatcactatgcgctgtaaaacgctgactgctgccgcagcagtactcctgatgttgaccgcaggctgttccactctggagcgagtggtttaccgacctgacatcaatcaggggaactatcttacacctacggatgtcgccaaagtgcgtgttggtatgacgcaacaacaggttgcgtatgctttaggcacgccgatgatgaccgatccttttggtacgaacacctggttttatgtcttccgccagcagccaggacatgagaacgtgacgcagcagactctgacgctcacctttaacagcagcggcgtgttaaccaatattgataacaaaccggcgttgacgaagtaattttgtgataccgcctgatgaggttacgttcatcaggcctgcaaacctctcccccgccatttggtacgaatttgcctgatggcgctacgtttatctggcttacaggcacgcctgtgcttcaggtgtggtacggcttccacaccgttatccggcaaaagaggctaattatctgccagccgatttttcggcgcgctggcggcgtaacgcttttggatcggcgattaagggacggtaaatttcaacccgatcgccatcctgcaccgtatcggtgagttttaccggacgactgtagatacctactttatttttcgccagatcgatatccgtgcgcaattccagcaagccggaagcgcgaatcgcctcttcgaccgtcgcgccctcctccagcgttacgcgctgcaaatactgcttttccggcagcgcataagccacttcaaccacaagtttatccggcacggtaaacctctttggcgcgaaccgtaaacgcctgcaccatgttggacgctaactctttgaatatacgaccaaacgccagctcaatgagtttattggtaaactcaaaatcaagctgaaactcaatgcggcacgcctcggggctgagcggggtaaatttccagccgccgatcagctttttaaaggggccatccaccagatgcatcagaatactctggttacgcgttagctgattacgcgtcgtaaacgtcttgctgatacccgccttcgacacgtcaacagccgccgtcatctgtgctggcgatgactccaggacgcgactaccaacacacccaggcaaaaactggggatacgattgcacgtcattcactaactgatacatctgttccgcactgtaggggactaaagcagtccgactaatctgaggcatagcaattcccatcaacataaatcgtgtaaataataccacttatcagcgagtaaaaaaaatgctgtccccaaccgtcatgccttaattgtgcgtgcatagcccaactcatgctaagatagatttttgcacctcatcaggacgtaatggggtgttttcgatatcagattacctatgaattcacgacacttatgacgaagaaaaaagcacataaaccgggctcagccaccatcgcgctgaataagcgcgcccggcacgaatactttatcgaagaagagttcgaggctggtctcgccctgcaaggctgggaagtaaaatctctgcgcgcaggaaaagccaatatcggcgacagttacgttatcctcaaagatggcgaggcctggctgtttggcgcaaactttacgccgatggcggtcgcctcgacacatgtcgtatgcgacccaacccgaacccgcaaactgttgttaaatcagcgtgagcttgattcactgtatggccgtattaatcgtgaaggttatactgtcgtcgcgctttctctgtactggaaaaatgcctggtgcaaagtgaagatcggcgtggcgaaaggtaaaaaacaacatgataaacgttccgatcttaaagaacgtgagtggcaactggataaagcacgcattatgaaaaatgcaggccgataatagacattttttgtgaccagcttctcagtatgaagctggtcaatgttcatatctcatgcatgcctcgaaaatatattctctgtgtctgacgcttatcaatagcaataaataccacaacaagaatatattcttcgtttaaaaaatttttatagcctaataacacaatacttcaaatgatttttataaaatttaatattgctgaataccttcacaaaaggtattgtttttatgttaaaaaagaaaaagaagaagaaattaaaattcattataaaacataaagataaataaaaaactatcatgcgttgttagcctgccccacctctccttaacacaaactccgttatatttcagacgcactaacatctttatcaatagatcttaatttgcagaaagatttttttctgactatatcatctaatacgaaagcactagtcaggcacaaaaaacaaaggattattcggcgagaaaaccagaccttcacctacgctcataaaaaagaatatggctacggaaattcatctctcatgatgaacgggaaggctcgtctacgcattttgccctgaacgtcgtgcccgttaattaatacacagagcaaatccatcaggagctaatttatgcgtctactcgccgtggtttcgaaattgactggcgtctccaccactgtggaatcctcagcggtcactcttaacgccccgtcaattgttaaattatcagtggcccgggaggaaattagtcaacttacgcgcattaatcaggatctggtggtgacgctccattccggcgaaacgatcacgattaaaaacttttacgttaccaacgatctgggcgcaagccagctggtactggcggaaaacgatggcacgttatggtgggtagaaaatccgcaagccgggctacattttgaacaaatcgctgatattaatgaactgctggtcacttccggcgcttcccatgaagcaggcggcgccgtttggccgtgggtactggctggcgcggtggcggctggcggcattgccgctatcgcgtcttccggcggcggcgattcccaccatcattcggatggcgataatccgccccccgataacaccaatcctgacggtaatccccctgataacagcaatcccggcggcagtacccccaacggcaatactccaggtagcagtaatcctgtagatactaccccgcctctcgctcccggcgaattattgatttcagcggacggaaaaacggtaagcgggcaagccgaagcgggcagtaccattaccatcaaagatccctcaggcaacgtcgttggcgagggcaaagcggatagcgacggtaaatttagtattgatctgacagcaccacagattagcggcgaacaacttaccgtgaccgcgactgacgatgccggcaataccggcccatccgcaaccatcgatgcgcccaacattcctctccccgatacaccagctatcaccgccgctatcgatgatgccgctcccctcaccagcacgctgagcaataaccagtttacgaacgacaatacccccactctggagggcaccggcagcgcaggcacagtcatccatatttacgccaatggtcaggaaataggctcaacaacggttgataccagcggaaactggcattttgccattaccagcgcgctagcggatggggaaaatcatttcaccgccattgcgactaacgtgaaaggcgaaagtagcgaatcagcccgctttacgctgactatcgacacactcatccccgatgccccacgtgttgaactgattgccgataacaccggtttgctcaccgggccgctacagaataatgaccgaactgacgaggcaaaaccgctattttccgggcagggagaggcaggcaataccatcacgattaaagagggttcaaccgttatcggcagcgctaccgtagacgaaaatggacgctggacctttacgccgactacgccgttaagcgatggcgaacatacctttaccgtcgaacaaagcgacaaagccggaaacacgagccgcgtgacgacaacgcctactatcattgtggacaccacgccgcctgacgccgctatcattgataatgttgcgaaagacggcacaaccgttagcggcaccgctgaagctggcagtactgtgtcgatctatgacccggcgggaaattacctgggctccacgattaccggagaaaataaccacttcagcatcacgctgaatccggctcagacccacggcgagcgtctggaagcgcgtattcaggacgccgtcggtaacatcggccccgccacggagtttaccgcttctgactcacagtatcctgcccagccgactatccttaccgtgacggatgacgctggcgccgttaccgggctgctgaaaaatggcgatgccacagatgataaccgcccaaccctcagcggtactgctgaaccaggcagtacgatatcgattaacgataatggctttcctgtagcgacctttccgcccattgtcgctgacgctgacggcaaatggagctttaccccctcgctggcgcttgccgatggcgaccatgtctttaccgctaccgcgaccaacgatcgcggcaccagcgggcagtccgtctcctttaccattgatatcgacacgcagccgccggtgctggaaggcctggcggttagcgacgtcggcgacagactcaccggcactacggaagctggcagtactgtggttatcaaagacagcctgggaaatacgctcgggagtggaacggcaggcgacgacggtaccttctcaataggtattagcccggcgaaaattaacggcgaaacattaagcattagcgttaccgataaagccgcgaatagcggtccggtagaaacgctgaacgcgccggataaaactgcgcctgcggcaccggacggtcttaccgtggcgaccgacggtctgtccgtaagcggtcaggcggaagccggggcaacggtcactatccgcgacagtagcaacaccgtacttggcagcgccgtcgctaatggcaacggacaatttatcgttccgctgaatacggcgcagactaacggccaggcgcttatcgctaccgccaccgatgtcgcgaaaaacgaaagcgccgccgcgacggttatcgcgccggacagtaccgcgccggaaatgccgaaaaacgtggtaattagtgaggatggcaccagtatcagcggcaccgccgaaccgggtagcgccatcacgatcgccacgccggacggcaagccgcttggcagcggcaaagcagatggcgaaggtcattttacccttcccctcgtccccgcacagaccaacggcgaacaggttaccgtcaccgccaccgacagcgccaacaacgtcagcccgccaaccacagcgcaagcgcccgatatcaccgccccggataagcccattatcactcaggtactggacgatgttgaaagcttcaccgggccgctggttaacggacaaaccaccaacgacaaccgtcccacccttagcggtacggcggaggccggcgcgcgtgtcgaagtctttgataacggcgtttcactgggactcgccacgctacagcccaacggtgcctggacgtttacgccgtcgcaaaatttaggtgaaggcgcgcatcgactgaccgtaatcgcaaccgacgctaaaggcaatgccagtcaggccgcgtcattcgacctggtggtcgatacgcaatcgccgcagcaaccggtaatcaccttcattacagatgatgcgccgggtattctcggtagcgtcgcgcatctggggctcactaacgacagcacgccaacgattaatggtacaggtgaaccgggttccacagtacacctgtatcagaatggcgcccggatagcagatattatcgtcggtaattccggcgtctggagctacgcttacaccacggcctcgccactggcggacgacacctacacctttaccgtgacggccagcgacagtaacggcaacaccacgcctttttcgaccgattttacgattaccattgatacccaggcccctgccgcccccggcgttatcggcgtagctgacggcgacggaaatacgattgataccaatcagattacccaggaatcccagccccggttgagcggtagcggcaccgcaggcgacacaatcatcctttacgataatggcaatgccataggtcaggcgctggtcggcacggacgggcgctggcagtttacgccgcctgccgcgctgggcgacggcgaccaccatctgaccgctcgcgccaacgatccggcggggaacgaaagtcccgaatccatcagctttaccctacgcatcgatacccaggcgccggatgcgccgcagatcgtgtcagccgccatcaccggcggagaaggcgaggtgctactggcaaacggcagtattaccaatcagcgtatgccgaccctcagcggcaccggcgaacccggcaccatcatcaccctgtacaataacggcgtagaactggctaccgtccaggtcaatccacagggtagctggacctatccgctaacccgtaatctgagcgaagggttaaacatcctgacggccaccgccacggatgccgcaggcaatagtagcccgacctccggcgttttctccgttacccttgatacccagcctccagcgcagcctgacgcgccgctaatcagcgataacgtcgcgccggttattggcaacatcggcaataatggcgcaacgaacgataccacgccgaccttcagcggcacgggagagatcggcagcacgataattctctacaataatggcagtgaaattggtcgcacaacggtaggcgataacggtagctggaactttacgcctgcggcactgacgccagaaacctataccattaccgtcacggaaaccgatagagcgggcaatatcagtccaccttccgcctcagtcacttttacgctagacaccactgcgcccgccaatccggttatcacttttgccgaagataacgtcggcgaagtccaggatactattgtcagcggcgcaaccactgacgacaatacaccggtcattcacggcactggcgacatcggcagcattattacgctctataatggcagcagcgttttaggcgtagtcaccgtcgatgagaccggcacctggacgctagcggtgaccagcgcgctgccggatggcgtctacaccctgactgccattgccgccgatgccgccggaaacagcagcggcgtatcgaacagctttaccttcaccgtcgacaccgttccgttgcagccgcccgtcgtcaatgaaatccttgacgatgttgcgccagtgaccgggccattaaccgatggcgcctttactaacgatcggacgctgactattaacggcagcggcgaaaacggcagcaccgtcacgatttacgacaatggcgtggcaatcgggacggcgctcgtcaccgacggggtctggacattcaatacgcccgaattatcagaagccagccatgcgctaaccttcagcgcgactgacgatgctggaaataccacggcgcaaacccagccgatcactattaccgtggatatcactgccccgcccgcgccaacgatccagacggtggacgacgatggcacgcgcgtcgccggacttgccgatccttacgctaccgttgaaattcaccatgccgatggcaccctggtcggcagcgctgtcgctaatggcaccggtgaattcgtcgttacgctcagtccggcgcaaaccgatggcggtacgctgacggcaattgctatcgatcgcgcggggaataacggcccggctacgaattttcccgcttccgacagcggtctgcccgccgtcccggccatcacggcgattgaagatgatgtcgggagcgtacaggggaatattgcggcgggcggcgccacggacgacaccatgccgacgctgcgcggcaccacggatatcggctctaccgttgaagttttcattgatggcgattcggcaggctttgccaccgttgacgccagcgggaactggatctttgagatcgcgacgccattaagcgaaagcacacattacttcaccgtccaggcaaccaatgcgaatggcccgggcggcctgtccgcaccggtcgggatcactgtcgatcttagcgcgccggcgcaaccggttattaccagcgcaacggatgatgtccccggcatgaccggtacgctggataacggcgcgctcaccaatgattcacgcccgacgctcaacggaacgggagaagctggcgccacgatccgcattctggataacggcgtagaaatcggttccgccacggtagatcaaagcggcaactggcgcttcaccccgaacgcgccgctagagagcaacgcgcacatctttaccgccgtggcgaccgatcccgctggcaatagcggccagccttcggacggctttacgctgaacattgacgcgcaggcgccagatgtgccggttatcacgtccgtgattgacgataacaatcaaccgaccgttccggtgttaccggggcaatccaccgacgatcggcagccaatactgaacggaactggcgaacctggcgcgacaatcaccatttttgataacggtacgccgcttggcacggctcaggtaggcgaaaacggtagctggaccttcccggtgccccgcaatttgtcagagggaagccataatctgacggttagcgctaccgatccggcgggcaataccagcgcggtctccgcgccgtggacgatcgtggtcgatattacgcctccggcgatcccggttctcacctccgtcgtggatgaccagcccggaattaccggcaacctggttagcgggcagctaacgaacgatgcgacgcccaccctgaacgggcgcggagaggcaggcgcgacgattaatgtctatcttgacggtaatcccgcgtccatcggtaccacgacggtgaatagcgacggcacgtggagtttcacgccgcagacgccgcttgcaaacggtagccacacgttcacccttagcgccaccgatccggcgggtaatagcagctcggtgtccagcggatttgtgctgacgattgacgccacaccgcccgccgcgccggttatcgccagcgtggcagataatacggcgccggtaacgggcatcgtccccaacggcggctcgacgaacgaaacccgaccaacactctcgggtaccggtgaggcgggtacaaccatctcgatttataatggcagcgcgctggtcggtacggcgcaagttcaggccaacggtagctggagctttacaccgtctacctcgctgggcgcgggcgtctggaacctgacggcgacagcaaccgatgcggcaggcaataccagcgccgcgtccgaaatacgctcgtttactattgataccacggctcccgccgcgcctgttattgatacggtctacgacggtacgggccccattaccggcaatctgagttcaggacagatcacagacgaggcgcgccctgtcattagcggcacccgtgaagccaacacaactattcgtctctacgataacggcacgctgctggctgaaattcccgccgacaatagcagtagctggcgctacacgcccgacgcctcgctggcgacgggcaaccatgtaattaccgtcattgccgttgatgccgcaggcaacgccagccccgtttcggacagcgttaatttcgtcgtcgatactacgccgccgctgacgccggtaatcacatcagtcagtgacgatcaggcgccaggcctcggcacgatcgcgaacggccaaaataccaacgatcctacgccaaccttcagcggcaccgcagaagccggcgccacgatcacgctctatgaaaatggtacggtcattggcacgacaacggctcagcctgacggcgcgtggagcgtctccacctcaacgctggcaagcggaacgcacgtcatcaccgccgtcgccaccgatgccgcaggaaacagcagcccgaacagtacggctttcaccctgacggtcgataccaccgcgccgcaaacgccaatcctgacgtccgtggtggatgacgtcgcgggtggggtcacaggaaatctcgctaatggtcagataaccaatgataaccgccccacgctgaacggcactgccgaagcgggcagcgtggtcagtatctatgatggcgacactctgcttggcgtcacctcggctaacgcgagcggcgcgtggagcttcacgccgacgacagggttaaacgacggcacgcgcacattaacagtgaccgccaccgacccggcaggcaacgttagcccggccaccagcggttttactatcgtggtcgatacccttgcgccaacggttccgcttataaccagcatcgttgatgatgtcccgaacaataccggcgccattggcaatggacaatcgaccaacgacacacagccgacgctcaacggtactgcggaagccaacagcgcggtaagcatcttcgataatagcgcgctggtcgcgaccgtgaacgccaatgccagcggcaactggagctggacgccaaccgccgcgctcggccagggaagtcacgcctatagcgttagcgccgccgatgcggctggcaacgttagcgccgcttcgccatcgataacgattatcgtggataccattgcgcccggcgcgcccggcaacctggtcatcaatgctaccggtaatcgggtgacgggcaccgcggaagcaggcagtacagtgacgattacctctgatactggtgtggtactgggaaccgccaccgccgacggtacaggcagcttcaccgccacactcacgcccgcgcagaccaatggtcagccgctactggcatttgcccaggataaagcaggcaacacaggcattgccgccggatttaccgcgcccgatacgcgtgtgccggaagcaccgatcatcaccaacgtagtagatgatgtgggtatttataccggcgctatcgccaacggccaggtcactaatgacgcacaacccacattgaatggtaccgctcaggcgggcgccacggtgagcatttataacaacggggcgctgctcggcaccaccacggcgaacgccagcggaaactggagctttaccccgacaggcaatttgaccgaaggcagccacgccttcaccgccaccgcgactaacgccaacggtacaggcagcgtctccaccgccgcgacggtgattgtcgatacgctggcgcccggtacgccgtcaggtacgctcagcgccgatggcggttcactttccgggctggcagaggcaaacagcaccgtaaccgtcacgctgacggggggcgtgacgctcaccaccaccgctggcagcaacggcgcatggtctctcaccttgccgacaaaacaaattgaaggtcagctcattaacgtgacggccactgacgctgcgggtaacgcctccggcacgttaggcattaccgcgccggttctgccgctggcggcaagggataacatcaccagccttgatctgacctctaccgccgtcaccagcacgcaaagctattcggattacggcctgctgctggttggcgcgcttggcaatgtcgcctcggttttgggtaacgataccgctcaggttgagttcaccattgctgaaggtggtacgggcgacgtcaccatcgatgccgccgcaacgggaatcgtgctttcgctgctcagtactcaggagattgtggtacagcgctacgacaccagcctcggcgcctggacgacgatcgtcaacaccgccgttggcgacttcgcgaatttgcttaccctgaccgggagcggcgttaccctgaacctgagcggcctgggcgaaggccagtaccgggtactcacttataacaccagtctgctcgccaccgggtcatataccagcctggatgtcgatgtacaccagaccagcgcaggtattattagcgggccaaccatcagtaccggcaacgtcatggctgatgataccgcgccgacgggcaccacggtcaccgccatcaccaacgccaacggcgtcagtacgccggtcggcgcgggcggcgtggatatccagggacaatacggcacgctgcacattaatcaggacggcagttacacctacacgctggctaagcccacggcaggatacggacataaagagagcttcacctacaccattacccagaatggcgtcggtagcagcgccgcgcaactggttatcaatctgggtcccgcgcctgtaccgggcagcgtgatagcgacagacaataacgcctcgctggtctttgatactcacgttagctacgtcaacaacggtccctcgacacaaagcggcgtcacggtattaagcgtcggacttggtaatgtactgaacgcgaatctgcttgatgatatgactaatccgatcatctttaacgttgaagaaggcgctacgcgaaccatgacgttacagggaaccgtcggcggcgtctcactggtttccacgttcgatctgtacgtttatcgcttcaacgatgccattcagcaatatgagcagttccgggtggaaaagggctggattaacaccctgctgttagccggacagtcccagccgctgaccctgacgttgcctggcggcgaatacctgttcgtgctgaataccgccagcggcattagcgtcctcactggctatacgttggcgatttcccaggaccacacctatgccgttgacagtatcaccgccaacaccaccggcaacgtactgaccaatgatgtcgtccctacggacgccctcctcactgaagtaaacggcgtggcgattgcggcgaccggcacaacggaggtaaacgggctgtatggctcgctcatcattgacgcaagaggcaactatacctacacgctgaagaacggcgtcggcgccgacagcattaaaacgccggacagctttatctatacggtcaaagcgccaaacggcgataccgatacggcctcgctcaatatcacgccaaccgccagggcgctggatgcgattaatgatgtcagcgataccctcagcgtcgccacgcttcaggataccgctgcctggctggactccagcgtcggcagcgccagttgggggctactcggcaaatcgggcagcgggagcggcacctttgacgttgcaacgggcaccgtacttaaaggcgcgtcactggtctttgatgtctccacgctcattacgctgggcaatctgaatattagctgggccattcaggagaacgggaccgtcatacgcaacggaaccgttccggtggcgaatatcacgctgggcagcgcgacggtgaccgtcaacctgagcggtctggagctggatgccggaacgtacacgcttaactttaccggcaccaataccctggccggggcggcgacgatcacgccacgcgtcatcggcaccaccgtcgatctggataattttgaaacgtccggaacgcataccgttctcggcaatatttttgacggcagcgacgcggcgggggcgatggatcagcttaatacggtgaatacccgcctgagcattagcgggtataacggcagcgccgccacgctggacgccgcggcgaataccaccagcgccacgattcagggacattacggcacattgcaaattaacctcgatggcgcttacacctacaccctgaataatggcgtcgcgatgtcgtccatcaccagtaaagaggtctttacctatcaactggatgacaagatgggtcatacggatagcgccacattgaccattgatatggcgccacaaatcgtcagtaccaaccaaaacgatgttctcatcggctccgcctatggcgatacgctgatttaccatctgttaaacggcgcggacgcgaccggcggcaacggcgtcgatcgctggcaaaacttctctaccgcgcagggcgacaagatcgatatccacgaactgctgaccggctgggatcaccaggcggcgacgctgggtaactttgtgcaggttcataccagcggcgccaatacggtgatatccgtcgatcgcgacggcgccggcagtgcgtttaaatccactgaccttgtcactctggagaatgtgcagctcacgctaaatgatctgttgcagaacaaccacctgataaccggcggttgataaaaaagccccgaacgccacgacgttcggggcaacaagcggtgatatttaaaagggataaactatgggaagagtcgcgcctgtcgccatcgtactggcatttgctttgtttcatcaccagccccggggcgcagaagcgccgccaatgattacatccgaaggattagcaacggaccagatgcttccttcgctggatggctccgccgctgagttgccgctcagcgccgccgcgccgggcaacctgacgctcaatgacgcggtcaatcgcgccgttaactggcatccttctattcgcgaagccgtcggcaaactgctcgcacagaatgaacaaatagaggtcgccaaatcgaaatattatccgcaagtcagcgctggcgtgaacaatgggtacagcaatacctacaccgatcacgggtatagcccctcgctggtgctgtcggtatcgcaaatgctttatgacttcggcaaagtggcaagccaggttcgcgccgaaaccgcaggcgcagcgcagcaacaggccaatgtgttgctcagtattgataccgtcgcgcacgaaaccgccaacgccattgtacaaacgcagagctggcagcaaatggtagacgcggcggaagaacagctcgtcgcgctggacagcatcggtaaacttatccggcagcgcagcgatgaaggcgctacgtcgctatctgacgtggtgcaaaccgaagccagaatcgaatccgcccgctcgcaactggcgcagtatcaggccaatctcgacagtgcgaaagcctcactgatgagctggctgggctggaattcgcttaacggcatcaataatgacttcccggcgaaacttgctcgcagctgtgagacggcgactcccgacgatcgactggtgcccgcggtactggccgcctgggcgcaggctaacgttgcgcgggcgaatctggactatgccagcgcgcaaatgacgccgacgatttcgctcgaaccttctgtacaacattatcttaatgataaatatcccagtcatgaagtgctggataaaacccagtattccacctgggtgaaagttgagatgccgctttaccagggcggagggctgactgcccgacgcaacgccgccagccatgcggtagacgcggctcagtcgaccattcagcgcacccggcttgatgtccgccagaaactgatggaggcgcgcagccaggcaatgagtcttgccagcgcgttacaaatccttcgtcggcaacagcagcttagcgaacgcacgcgcgaactgtatcagcagcaataccttaacctcggttcccgcccgctgctcgacgtgcttaatgcggagcaggaagtttaccaggcgcgttttgccgaactgcaaacggaaagccagttgcatcagttgcaactgaactgtctgtataacaccggcgcgcttcgtcaggcgttcgcgttaaatcatcgcagcattcaatccgtggagatccagccatgacccgcgccgcccccgatgtagaagaggtactcagtgagcgcgcgctaagccaatgggcgcaggccatcagctatgtcgccggtcattatcgcgttgcctgttctcccggttcaattcaggccaacgccccgtggtttaggggtaaaagcagaacgaccgccttaacgcagctcgcgcggcaggcgggtttatcctttcatgcgccggacatagacaaaacggcatttagtcagtggcgattgccgttggttgtcgagctccgggacgggcagttattggtcatcgagcatgttaatggcgaagatgcggtagacgtttttgtgattgaagaagagggtcagcgtaaccgcctgacgctcagcgagttattgccggagatcctctatgttgccgcgctacgcccgctatcggcgctcaaggatagccgcgtcgatcgctatatctcccgctttaaacccgactggatgcgcgagctggttctgcaggatattcgcccttatttaccggtaatggtcgccgcctttctgattaacgtgctgtcgctggccgggattgtgttctctatgcaggtttacgatcgggtgatccccgctcagtcatatcctaccctgtacgtgctctccttcggcgtgctggtagcggtgctgttcggttttctgctgcgtgaagcgcgtacgcacattatggacgtgctcggtaaacgcgccgatatgcgcatttccgatcgggtattcggtcatgcgttaaggctgcgcaacagcgctatcccccgttccaccggcagttttatctcgcagttacgcgaactagagcagatccgcgagatgattacctcttcaacgctggcgaccattgtcgatctgcctttctttttcctgtttatgatagtcctggcgattattgccccaccgctggcatggatagcgcccgtggcggctctgctgatgatcctgccgggcgtcgcactgcaaaaaaaactggctgtcctcgccaaccaggccgcccacgaagcgacgctacgcaatgcagtcttggtcgaaagcgttcaggggctggaggatattaaactgatgcaggcggagaaccgctttcttcagcagtggaatagctatatccgtattaccggcgagtcgggtctacgcacccgcaaactcacgcaagggcttatcagttgggggatgtcggtacaaagtctggtgtatgccgcagtgattatgttcggcgcgccgatggtcattgaaggcagtatgactaccggcgccgtggtcgccgcgtcgatgctcggctcacggatgatcgcgccaatggctaacctgtgcggcgtgctggcgcgctggcagcaggtgaaagcggcgaagatgggtctcgacaacattatgcaactgcccaccgagacacagcatgacgatagcctgatacaccgcgacatcctccacgggcattacctctttgaaaatgctcagtttcgttaccataacgacgatcaacgcataccgctgcgcctcgtgcgtctggagatcatgccaggcgagcggattgcgatactggggcgtaacggcgcgggtaaatccacacttttacaggcgatggcgggcggcctggagatgattcagggagatgcccggcttgataatctcagcttgtcgcacatcgatatggcggatttacgccgcaacatcggctttcttagccagaacgcgcggcttttcttcggcaccctacgagagaacctgacgctcggcgcgccgcacgccaacgatgaacagatttttgacgcgctcgaagtcagcggcggcgccgtcttcgtcaggcggctggcaaaagggttggatcatcccattatggagggcggtaacggcctgtccggtgggcagcgccagtccctgttgctggcgagaatgctgctgcgctcccccaatattgtgctacttgatgaacccagcgcctcgctggacgagcatacggaacgagagtttattcagcggttacatcagtggcttggcaaccgtaccctggtcgtcgcgacgcaccgggtaccaatactggagctggttgagcgtgtcgttgtcctgaaagaaggacaactggtgatggatgcgccaaaagcgcaggcgcttaacgcggatcggatgcaaagtcaccgtcgggagtggaaaaatgaaaatcaatcagcatgatgccgcgatggacgatcccgatattcagcgtgaacgggcgttttccggcgcgggtcgtattgttctgatctgctcactgttatttctcattctcggcatctgggcgtggtttggccgactggatgaggtttccaccggcaacgggaaagtgatccccagttcacgcgaacaggttctgcagtcgctggatggcggcattctggcgcagttgacggtgcgggaaggcgacagagttcaggctaaccagattgtcgcccggcttgatccgacgcgtctggcgtccaatgtgggtgaaagtgcggcaaaatatcgcgcttcactcgcctccagcgcacggttaaccgcggaagtcaacgacttacctctcgccttccccgctgagctgaacggctggccggatctgattgccgcagagacgcgtctctataaaagccgccgcgcgcagctggccgataccgaagccgagctacgggatgcgctggcgtcggttaataaagagctggccattacccagcgtctggagaaaagcggcgcggccagtcatgttgaagtgctgcgcctgcaacgacaaaaaagcgatttaggcttaaaaattaccgatctgcgctcacaatattatgtgcaggcacgcgaagcgttatcaaaagcgaacgctgaggtcgatatgctctccgccattttaaaaggacgcgaggattccgtcacccgccttaccatacgttcgccggtacgcggcattgttaaaaatatccaggtcacgacgattggcggcgtgatcccgcctaacggtgagatgatggagatagtgccggtagacgatcgtctgttgattgaaacccgcctttcgccgcgtgatatcgcctttattcatcccggccaacgcgcattggttaaaattactgcttacgattacgccatttacggcgggcttgacggcgtggtggagaccatttcaccggataccattcaggataaagtgaaaccggaaattttctactatcgcgtgtttatccgcacccaccaggactatctacaaaataaatcaggacgccgtttttcgattgttccaggcatgatcgccacggtggatatcaaaaccggtgaaaaaaccattgtcgactatttaatcaaaccgtttaatcgcgcgaaagaagcgctgcgcgagcggtaaatcgttgaagataagaagatacgggggctggtcacgcgtgtcacaagtctgttatacttaccttacacattggggctgattctggattcgacgggatttgcgaaacccaaggtgcatgccgaggggcggttggcctcgtaaaaagccgcaaaaaaatagtcgcaaacgacgaaacctacgctttagcagcttaataacctgcttagagccctctctccctagcctccgctcttaggacggggatcaagagaggtcaaacccaaaagagatcgcgtggatgccctgcctggggttgaagcgttaaaacgaatcaggctagtctggtagtggcgtgtccgtccgcaggtgccaggcgaatgtaaagactgactaagcatgtagtaccgaggatgtaggaatttcggacgcgggttcaactcccgccagctccaccaaatataacaaggggttacgtgaaaacgtagcccctttttaatgtccagtgtccacttagcgtccacctaagatcaggtgaccagatagggataaaaaatgccaacacctgaaagtttgtggaaaattctggcttcacccatttcgacaaagacggctgttaggtatggattcctctctgtagcaattgtcctttctatccgctttatactcccaatacttaaggacattgcgcctctaactgaacaagacttgccggggtattcctatgcagcgcattttgctctaacgattttgttttcacttattgcggaaactctaacctttgaactagtagcttggatgtatctcaagctcgaaaaattcatagaaaggaggaaattaagaaaagaactcgcccgcaaacaagagattgagagcaaggaaatcaagagaatccaagaaaagtttattgaaaatttcatactggcatggcccctcatagccccccgctataaatattttgtctatgagctacgaaggggccacaagggctactcagatacgaattcggccatcaattaccttagacaacaaggttggattcacccaataactgaactaccttatagccattgcctttatcggttagacgaactcatttttgaagccctaaataggatagagtcagccgcaacagcaacagactcctagctttgcatagctgcccgctatgcaaactagtgagccaaataaatttagacttcaggcaaagcctgctggctgaatcgccacggataatctagacatttccgagccgttgataagattgtttttcatattccttccacgtcagccctcttaatgtggtggatttcatgcacctgtagcaatcgtagcgatccggatcaatacttgctaggacgatgaaacactccacgggagctcatgcaaacccgtgcgcggatttgcgtttctggctagccaaaaccccaccagcactttcaacacggctccatcctcaatggaaatcaaatcttatccttatcaacccgttaagaatgtggttaaatcataaccttacgtctaatatccattcatgaagggtaaacatggaatcgaacgatcctggaaagctgatttggcatgtcgcctgcgatgaatcagggatagatggtcagcgattttatggatttggtagcttatggatgaaataccagaggcgtggcgattttgcgcgtattgtccgcgaacttcgtgagaaacataactgtagcgatgaaattaaatggcagaaagctcattccaagcgtaacgctgcattctatcaggatttaatcgagaccttcttcaaacacccttggctagcttttcattgcatagtcgtggaaaagtcgaaggtagaaaaatctttccacggtggcgactatgatcttgcaatgcgtaagcattttggcaagctaatagagactaaaattggcaatgtcatcaaagcccaccccgacagagagtgtgagtttcgtgttgaagtagatccattaccatcccgctacaaaaaagctgatgaggaattccatgtaatcaccaaccacactttggcacgtaggtttgggcgcaaagatattatcaaaagcgtagtaagtaaagactcaaaggcgtcagaacatattcagatagcagattttttgctaggtgcggtcatgtgcgcttatcaaggtaaagcaacttctgaggcaaagctagccgtcgcaaacaatgttgcatcctacttgggatgggactcactgatgcatgatacttggccaacagaacgtaaattcaatatttggtttttcttcgacaggtcaaaaggaccaagggatattgtcacccaagaagttaagctcacttacgcccttcccaacacacgaaaatagtagatccgacctctcagccggcacggttggagtcccagtcattcgacgaagttaccaactaggcggtatcaactttcggggggccgcctctagatccccaaaatcttaaactcgttataagtagcataccccgtaaccaatatgacttcaacaaatccttaagaaaatcataatttaacaagatacaacttatctatcttatctatctcaacctaaaaactattgacctataaatgtgccctaattttagctatctaagtagagttgtgaaacgtcctctcttggccttgccacaagacggactaaaaggaagcgacaacactttaactgccattcaggacagttagtcaacacgcaaaaccccgcctctcaataatcaacttaaaaatcaaaaaatatacaaaaccccttccatatcaacaccatcgccactcttttgcgccttcgcgcaaaaaataaaaatccccaacaaactcaaccacctcccccaccaattacaaggacgccagcaaataaaacaaggggcaacgtgaaaacgtagcccctttttgttgtctatggaaaacccccagctaggctgggggttccggaaagctttcagctttaagccagttattaaaaccccttttgatttgttaaaacatcttgcggtctggcaactgcaaaagttcaacaagaaatcaaaagggggtcccaatgggggacgaaaagagcttagcgcacacccgatggaactgtaaatatcacatagttttcgcgcccaaataccgaagacaagctgtaaatagacccgttttagttccatacattttttgagttcccggccaaataatggtgctgtcggtattcctccggtgtcatattgttcagcgattcatacggacgttcacagttatattctgataaccatttttccgtgatttcacgtacttcattcagcgttctgaacagataaaaatcgagtatttctgtgcgatatgtcctgttaaaacgctcaatgaaagcattttgtgtcggcttacccggctggataaacaccagttttacggcatgtttctctgcccattcagtcagtgccagagagataaattctgggccgttatccatgcgaagcatggccggatagccacggtttgccgcgatcctgtcaagcacccggaccactcgtggggctggcagattccgatctatttcaatcgacaacgcctcacggttaaagtcatcaacgacattgaacgtgcgaaaacgacgcccacagaccagggcatcatgcataaaatcaacagaccagctctggttcagcgcttccggcgtggccagtggcgaagggttacgcaccggcagccgttgtttgcccttacggcgaaaattcagcttcagcagacaataaatacggtggatccttttgtgattccacatgtatccctgccgccgcagaacctgaaaaagcttcggaaaaccgtatcgtggataccgttcagctgccgcctgcagtgcggtaataacgggttcgtcacgtgtgttatccggacggtaatgataaaccgttctgctcaggttcaggctccggcaggcctgacggatactgagtccgaatgccgttatcagatgagtgaccagctcacgcttaaaggctggttttaaagctttttttcgataacgtctttcagcgcccggttctcaaggctcaggtcggcaaacatctgtttgaggcgtcggttctcgtcctcaagatcttttatctttttaatatcagaaggttccatgccgccgtatctggacttccagttatagtaggtggcctcagagataccggcctcccggcagacatctttaacggttcgtccagcttcaaccgacttaatcacagtgatgatctgatgctcagtaaaacgggctttacgcatagcgatctccttcgttggcagattgattatgccggatgatctctaaatgtgaatggcacgattatgcgggatacttacaaagcgttctatggagagaagcgtagggcagtaggcagcatattaagaaaattgtgtgaatggaaaaacgtacgaattctggaagcagaatgttgtgcagatcatattcacatgcttctggagatcccgccgaagatgagtgtgtcgagtttcatgggatatctgaagggtaaaagtagtctgatgctttacgagcagtttggggatctaaaattcaaatacaggaacagggagttctggtgcagagggtactatgtcgatacggtgggtaagaacacggcgaagatacaggactacataaagcaccagcttgaagaggataaaatgggtgagcaattatcgatcccttatccgggcagcccgtttacgggccgtaagtaacgaagtttgatgcaaatgtcagatcgtatgcgcctgttagggcgcggctggtaagagagccttacaggcgcatcagaaaaacctccggctatgccggaggatatttattgtctatgtccactttacgtccaccaaattaaaggatttaacgccaggattaatgcagtcattaaaagtatggcactgactactttaggaagaggcgtccgtcacatcactgcacggaaagtctgcacagaacacgatctgccgccggacaccattaaattgccccgcaacgtgttatcaatactactccctacgtttcccgttaccttgctgtcggtacgtttacctcattgtctgaaaggttatttgcgaagttatcattaataatccacgggcgtctggtatgcgaatccagttccccaatcctggcgctttgcctgtgcgaccatacgcgcgtaaataagcctgaaaccaaacttcaccgcttaacgctctccccttccccgatttttatgaaaaaaatcatcacatgatcaagggtcgtatttgttattgcatttttcaaatgatattggtaattattatcattctcattaatgacttgttcgatttatgacgtggagagagaggatttctcatgcgtattctgtttgtcggtccaccactgtatggactgctataccctgtgctgtccctggcgcaagcgtttcgtgttaatggccatgaagtgctgattgcaagcggtggaaaatttgcacagaaagcagccgaagctgggttggtggtatttgacgctgcgcctggtttcgattcggaagcgggttatcgccgtcaggaggcattacgaaaagaaaataacattggaacaaaaatggggaacttctcattcttcagcgaagagatgactgacccgctggtcgcgttcgtcgggcagtggcgaccagatctcatcgtctaccctccccttggggtcgttggaccactgattgccgctaagtatgacattccggtagtgatgcaaaccgtcggcttcggtcatacgccctggcacatcaaaggcgtgacgaaatcactttctaacgcctaccgccgccatggggtcagcgcgccaccaagagatctggcgtggatagacgtcacaccgcccagcatgagcatactgcaaaatgacggagagccggttatctccatgcaatacgtcccgtataacggcggcgccgtctgggaagaatggtgggaacgtacacctgatcgcaagcgtcttctggttagcctcggcaccgtcaaaccgatggtggatggcctggatctgatttcctgggtaatggattctgccggcgaagtagatgccgaaatcatcctgcatcttccggcaaacgcccgctcggatttacgttcgctgccgtcgaatgtccgtctggtcgactggcttccgatgggcgttttccttaacggcgccgacggttttatccaccatggcggcgcaggcaacaccctgacggcgctacatgctggcattccgcagatagtctttggccagggtgccgacagacccgtcaatgcccgcgccgtggtcgagcgcggatgcggcattattcccggtaagagcgggcttacgagcagcatgatcaataccttcctcggtaatcgcgcgcttcgcgaggcgtcgcaggaggtcgcggcggaaatggcggcccagccttgcccgaccgaggtggcaaaaaaactgatcgccatgctgcaacacggctaaccgcggcagcgcaatgacaatatggcggctgaacccagcgtgtgtcgccatatctcatctttcaccgataaggaggcttaatgcccgcgactcattcccccatgcccgctcgtgcctggatagttcgccttgcccgcgtgtgttgggaacgtaaaacactgagcatcattgtcatcgtagcatcagtatcgaccattttactggctgcgctgacgccgctaataacgcgtcaggccgtcaatgacgcgatagcaggcgatacgacccacctgccgttacttgcctgcggcctgctgttaattgccctttttgattttatcgggaattacgtgcgccgcggctatgccggggaactctcgctgtgggttcagcatacgttacgtagccgtgcgttcgacagtattcaaaaactggacggcgcaggccaggacgccttgcgtaccgggcaggtcatttcgcgtaccaacagcgatcttcaacaggtacacaccttgctacagatgtgtccggtgccgctggcggtgctcacttactatgtggccggtatcgcggtgatgctatggatgtcgccatccatgacgcttatcgtgatttgcgtactggccgcccttgctattaccgccctgcgcgcccgtcgccgtgttttcgcacaaacggggcttgcctcagaccggctggcgcacatgacggaacatatgcgcgaagtattggaacagatctcagtggtgaagtcctgcgtggcggagttacgcgaaacgcgttggctcgatggtcagtcgcggcagatggtgcgggtacgcatcggcgccgctatctcgcaggcgatgccgggcgcaaccatgctggcgctaccggtgatagggcaaatcgtcctgctgtgctatggcggctggtcggtaatgaatgggcgcatcgatctgggaaccttcgttgcgttcgcgagttttctcgctatgctgaccggccctacccgcgtactggcatcgtttttggttatcgcacagcgcacacaggcgtcggtggagcgcgtcttcgcgcttatcgacacgcgttctcgcatggaagacggtactgagtcggttgaaggtcagattatcgggctggacgtggagaagatgagtttccactacgacaacggtaaccgtatcctcaatgagatctcgttttccattcacgccggtgaaaccgtggcagtggttggcgcctccggctccgggaaatcaacgttgctgatgttgctggcgcgcttttacgatcccacctccggcggggtgtggctcaacaccactacgggtcaacagaatattcgcgacctgaaactgacggcgcttcgtcgtcgcgttggcgtagtgtttgaagacgcgtttctgtttgccggtacggtggcggaaaacatcgcctatgggcacccgcaagcgactcaggacgacattcgacgcgccgccgatgccgcaggcgccagcgggttcatcaatgcgctaccgcaggggttcaacacccgactggccgaacgcggaagcaacctctccggcggccaacgccagcgtattgcgctagcccgggcactgattaccgcgccggaactgctgattctcgatgacacaacctcggcggtcgatgccggtactgaagcggaaattaacacggctcttggtcgttatgccgataatgagcatatgctgctggtgattgcacgccgccgttcaacgctgcagttagccgatcggatcgtcgtgctggataaaggccgcgtcgtggatatcggtacccaggcggagctggatgcaaggtgtccgacgtttcgctcgctgatgagcggcgagggtgattttctcgcccttgccccggcagaacaacggacgctatggccaacaacgcaggcggcaaaatccgacgacgcgcatgagcgccagacacccgccggaaaaggttttgtcgaccggatgacgcgcgttccggaacgcgccgtacagatggcgctggcaggccacgggcgtcaagtctcatcgctgctgacgccagtagcctggatgttcgtcatcgccgccctgcttatcgcgcttgattccgccgcaggcgttggcgtgctggtgcttttgcagcgcggtattgactcaggcgttgccgcaggggatatgtcgactattggcatatgcgctctgctcgcgctgtgtctggtagcgatcggttggtgctgctatgcgctgcaaacgatcttcgccgcccgcgcggcagagtcggtacagcatacggtacgcttacgcagcttcagccacctgctacgcctgagtcttccctggcacgagaagcacatcgactcgcgtcttactcgcatgaccgtcgacgttgattcactcgcccgatttctgcaaaacggtcttgccagcgcggccaccagcatcgtgacgatggtcgctatcgccgcggcaatgttctggcttgaccccattcttgcgttaacggcattaagcgccgtacctgtagtgatactggcgacgtggatttaccgccgtttgagctcgcctgcctacgcccaggcacggctggaaattggtaaggtgaacagtacgcttcaggaaaaggtctccggtatgcgggtagtgcagtcacacggtcaacagaagcaggaagccgccaggctacgggcgttatcagacaacttccgcgccacccgcgtgcgggcgcaaaaataccttgctgtctattttccgttcctgaccctctgcaccgaggccgcctatgccgccgtgcttttaatcggggctacccgggtcgccggaggcgaaatgacgcccgggatactggcggcgttcttcctgctactgggacaattttatggcccggtacagcagttgtcaggcattgttgattcctggcagcaggcgaccgccagcggcaaacatatcaatgcgctattggcgactgaggaaacggagaatattgaaccgtcctccataacgcctggcactggcggcgcgctacgtctggaggcattgacattccgctatcccgaaaaaacgcaacctgtgcttgataatctctcgctcaccattccgccaggaacggtagtcgcggtggtcggacgtagcggcgccggcaaatcgacgctgatcaagctgctggccgggctctactctcccggcagcgggcaaatccgtgtcggtgagcgcctaattgatgccgcgtcgcttagtgattatcgtcgccagacggggctggtcactcaggatgtcgcattatttagcggcgatattgccgaaaatatccgctattcgctgccagacagcagcgacacggaggtggagatcgcggcgcgacaggcgggactctttgaaactgtgcaacatctgccgctggggttccgtactccggtcaataacggcggcacggatctgtccgcgggccagcgtcagttgattgccctcgcccgcgcccacctggcgcaggcgcatattctgctgctcgacgaggcgacagcgcgtatcgaccgtagcgccgaggagcgcttaatgacctcgcttaccagggtgacgcataccgagaaacgcatcgcgcttatcgtcgcgcaccggctgaccaccgctcgccgttgcgatgttattgtcgtaatcgataaaggatgtatcgctgaatatggcagccatgagcagttgatagcgactcatggcctgtatgctcgtctgtggcgggacagcatcggccagacacgcgatacgcaaggagaggtcataggatagtttttatcgccacgatttacgcaaaagaaagcccgcaagcggctgttcctgtaacagccgctttagctattagtactaaccgaaatataaatgagatggaatacaaagaatgagactgagcccgcccgtcgctcctgtcgctatacagaccgctacgcgccttcgccgccaactcgccgccggaagccaggttgacgcttctcacttctggcgagaagcaaactcgctcgcactgccgctggtgacagccattaacggcgcagacgatgaacgggaagtcaccttcctgtggcgtgccgcctctcctctgcggggggtttatgttcgcctgaaccgtgtcaccgataaagataacgtggcgaaaggtatgatgacgcaactgcccacaacggatatctggcatctgacgcttcgcttaccggcgtcctactgcggttcctatacgatggtcgaaataccaccggaaaccccggacgagacggtgttgcagcttggaagccgtttcgcctcccttgtcgggaaggcggacccgctgaacagcacgccgggaataaatgttcggggcaatgcgcaggagtccgttctggcgctggatcatgccccggcacaggaggagtggtcaggctgtcgcgcttacgccgggcagcttttcacctcagagcatcggctcgccggacaatgtcgccgtgtgcggctgtatcttcctgacgttcctgtcgtacaaccgctgggcttgctggtactcacggatggcgagatctggttcgaccatcttggggtaagcgccgccattgacgccgccatccgcagcggacgcatcgcgccggtggccgtactcggcattgataacatcaacgcgcgtgaacgcgtcgcaatcctcggcggtcgccgcgagctggtgctcgacattgccgaacgcctgctgccaactcttcgcgccaactacccggaacggcggtgggcggaccgtacacaaacggtgctggcagggcaaagcctcggcggcgtgaccgcgctgatggcggcccgccacacgccagagagcttcggcctggtgctgagccactccccctcaatgtggtggacgccggacaaccgcaatcgcccgccccatttcagcgcagaagagcgctcatgggtcagcgaacatgtgttatccgcgccctcgccagccgtacgtacgcatctgtgcgtgggagcgctggaaggttcgacggtcccgcaggtcaaacagttgcatgaaaaattgcgcgccgccggcgttgaaagccattgcagcgtgtacaccggcggtcacgattatgcctggtggcgcggcgcgctgattgacggattacgtctactgccccgataaaacttcacctgccaaaaaggaatcacatccgatgtatggtcgccagtaccacaacaagtgctatcgcatggcgctatttttagtgagtttttgttttagcgcgctgagttatgcgcagccggatatgcagccattaggaccgaatattgctgataaaggttcgggatattaccattttagggtcaatgactttcaatctgccgatggcgcaagacattaccgggtatggaccgctattcccaataaagccgccccgccgtcgggttatcctgtcttatatatgctggacggcaacgcagtgatggacagactgccggagacgctgctcaaacagctggcagaccactcgccgccggtgattgtggcgattggctatcagactaacctgccgtttgatcttaacggcagagcttatgactatacgccggcgccgggaatcgaaggcagtgaaaataacccgcgttttcatcgtaagaccggcggcgggccagcgttccgccagctactggagagacatatcgcgccgcaggtggaacaaggaataaccatcaaccccgaacggcgcggggtatggggacattcttatggcggcctgttcgttttagactcctggctgtcatcatccttctttcatatctattacagcgccagcccgtcactcagcagggataactttgccctgttgaatcgccttacggcagtgaagccgtcgccgttctgccataaaaaactcatcataatggaaggttcagcgtcgaatggggatagcaggcaacgccagatggccgagctcctgcaaaaagttcaggagaccgtgagaacgcttgagaacaacggcgttaacgcggccctgcagcattacccgggcctgggccacgggcccatgtttaacgcctcttttcgcagtgcattgctggatatcagtcgcgaaccggcaagccaaaaaccacgctgtcattaacccgccgccagaatatgcccgccagcgacgggcataatccatcaaaacgaggccgtcacaccggcataataagcccgacccggttcgttataggtatttgccccttcggcggagcgatagatctgtttatcgaagatattgctgataccgacattaagacgcaggttcttattgatatcgtagttaacgttagcgccgaccagtgagtaagcccccagcgctttcccggacaatcctttggtctcttcactacgcgactccgcatgtgttcgcggtttttgcttgccgtataacgtccagttgacgttagcggagagcgcgctggtgatagtccagtcgaggaaggtattcaccgtatatttcgggattatcgataagggattaccggtatctttttgctcagaagtgatcatataagtcgcattggtattccagttcagacggtccggcatcagcggaacagccatgctggcttcaataccttcaatcagcgctttaccgccgttctgccactgcaatacataagcgccagatgcgcttctgccaataatctgatcacctgcgacaatcttattctgataatcgttacggaaatacgttacgcttgcgtgataatcgtctacggtaaattccagcccaatctctttattgatactaatttcaggatcgaggttcttattaccgaccaggtaacagccgcctgacgtaatatcttttggacaaccgttgcctttcgaatagagtaaatacccctcactggtttgatacaagttcggtgccttaaaggcccgggcaataccggctttcaccttgacgtattcacctaactcctgggaaaggttaagactgggactaaaattactcccggattcgctcaaatagtcaaaacgcagacccggaataatattggtaccggccatgggttcgatattatcttcaacgtacagcgcactgatttccgatttatttttgctgctacggttagccgccgaaccgggaatcccggcgatattgctatccttaaccgtcagactggtagaggaaggatcgttcagctcatcgcggttccactccgcgccgacggtgagcgtttgctcaaatagccatatcaccgggacattcacctcgccgctggtgcgatacgagatcaggcggttagtggtgaacgtctggtcgttggtaatgcgcccctcgccgccgccggagagtccctcattcatgcgggtattatcggttttttcatagtagaaccccaggcggctttgcccccagtcccagatgccgttatgagttagaccgtaattctgccggtacaggcgattggtctcccgcccggactgcgccagacttttagtaaccgcgttcgaagtactgttttgcgtatcgccggcatagatattcccctgccgactgtatcccgcttcaaaatcaaggatttgctgcggggtcattttccatgagaagacgctattaatatctttattggtgaccccctcccgtccggcggcattcttggtaccggcggaggagttaatatcccagctgtcggcatcggttctgttgagattaccgtacaggcgcatcgtcaacgtatctccagccaacgggccgctaaggctaaagttaccccgccgggtgtcaccttctttgctgctttccggctggttggtatagagcgacagcgaaccatgccagtcgttagtcggacgtttggtgatgatattcaccaccccgccagcggcaccggagccatagcgcgcggcggcgggcccacggatcacttcaatacgttctaccatctccggcggtacccagttcgtatcgccacgggtgtcgcgttctccgcgccagctatagcgaaccgaatttcgtgacgtcaccggcacgccgtcaatcagcactaaggtattttccggccccataccacgaatatcaatttgtcggttatttccgcgcgtccccgaggcgctattgccggtaagattaaccccaggcatcttacgaataatatcggcaagatcgttaacgggaggattcttctgaatatcgtcacgagtaataatcgaaacgcccggctgttgctttaatacttgctcggcagtggattcaaccaccatcgtttcgccgttgtcgtctgtagattctgctgctgataatggactattaacccctgtagaaaccacggttattaaccagaggaacttattaactttcatacccattccctaaataatgtctaaagtagcgctgttgccctcaagctcacatccttgccaggttacggctatatagtaattattatcatatgctaatgataataattatcattcaattaagaaaaaggcaatctttcgaccgcaaaaatctggtcataagaaaacagaaacgggattttgcaatatgactctctgtccgggctccgctttgccaataaatccgggaagggtggcagaatgcgcctactgagcggaggttttacaaaacaggaatagataaaataaaactatttttcaaagcgttaatgacaagaaacaaccaggaaaaatggtatagcgcggttcagagtccatcggcgcttccctgccgacggcgaaccgttcttacagtttgccagaggctttccgtcagggtaatggcgggatcggatacgattgtagtcattcgatatatgacgatgaaagtgatgttggcgccaaaatacaaagcgcctggtaatatttatcaggcgctttgcagacagaaaaccatcaaacatcggtttctcgttctccagcatctaccgggaaaaatgacaacccacagttagtggattttactgtcgggtcttgctagggattttgtgttacccccaggtcttttaaaagaccgcgtaacagcactaaatccttgggtgtcattttttgctttggttcaccctctttaggtggacgaatatcctcctgactagtacatgtaacacaataaccttttaactctatccacttaggcttagggggggccttaggatcggtaggcgtcgagctgacaacgcacgaacaggcacttatacatccaggcatagcgttttccttttcaaacaattcgctttagttggaagttctacttgagaaaataggaatggttattcagatatttttaccgtcgcatactcctgtaataataaaagatactgtaaataatttactctcagctactattcagtagcagattgttattcttacattgcttttatttcaggtttacgtcaaaaagggctaaatattttcactataaaattcgttaaagagtgtttgtgtacttgtagacattgtggcgtcttcggtacgcaaatgggttagtgtacaatctttaaaacaggtattgtttaaattagcctcagccaaatcagccccgtccaggttcgtagaaatgaaactcgcctttcgcagatttgcccgggttaagacagcgtcttccataattgcagccattatagtagcaccctgtaatgtcgcaccgctcatatcagcacgtataagggttgcgcctgaaagattagtgtgatccatatttgcaccggagcaattacattctatcatgctacagcctaacagactcgcgtgttgtaaattggcgccagtaagattagcgtgatcgagggtagcgccacacataatgctatcttccagacaggcgttcttgaaattactgtcgcctagtgatgttcccgatagatttgcgcccttaaaatttgcaccttcacaatccgccataaacagcactgccccctctaaatttgcgccgcttaagtctgcgtcacataaattttctgacgtcagatttgctccggtaaggacagcgcctttaagattcatgcctccctgggcagttaatattacagaatcctgagggagagaaaattcgcatctgaatagtaaagctcggcatattttttcaaaagaggcaagcggaatttctcttgtctcagaatggtcgcctttactgactcgtacaataacttgtccagcttcgttattctcaccaggaagattaaattcgacacgacacccatccatatcatccaggatgatgttttctggcaacggagcacctctgtcaggcattgtacttttcaatgtctcagccatagtctctatcaattcctgatattgtgtttcatttctccgacgtatcccaccacaggtaaaaaagttaatgatatattccagaatggttttgggcgaggtagcttgccgcatagcagcagaagtccccgcgccaaaagcagatttagccataccagccagactatcgagtgaacgctccatatattttctcccagagacagcaacacagtgcatgataaaatttatcatatagatttgcatttagagataaggtgaataccccctttacgtctggttacataataacgtatcacgacgcgttgctgtctggcttacacaatagcagccaaataaatatattggcttatactcgtcatacttcaagttgcatgtgctgcggccgcgttccctcaccccagtcacttactttagtaagctcctggggattcgctcgcttgccgccttcctgcaactcgaattatttagagtatataacatcatttaaaataataaacacggcattcgttttaatactacgttcaggactcatcccactcattagcagaaaacctattaaaaagcgtgttcaggcgttttattaccgccattgataaactgtttaacaacatcgtctgtacagaccttcttcgttgcctttacgtttaactcaatcaggctaccgtctcggttataagtctatcgagtagtagggacgtagtatgacgatgcagcaaagtgatatggaaagatataatccattattaatgttaaaagaagtcatggcgcagacgccttatcgccataaacgctggggagagcgtaagtttcgctataaatttgtattacgttgccttattaaccccgtaacgacaattaaatacttcaatgaattatgccatctgtctcagcccagaacgctgattattcatcgtccactgttgccggcaaaaatccagcggccctatttgtataccgggcttagcatacgttgccgggcaaaagctattctggaacactaccagttcgttcagtcctttccggaaagtaaaattaaaaagatcctcctgtccgaggaacaaatcttgctcgctcacctggaaggaaaaaacgacgctctggtagatatctactgcggtccctgtggctatgacagagaaggtgagctgacattaacgctgtgtttcaatgatacgccgttggcacgtttatcattttcctttatccgccatgaagggaagcaaatagcgctggttgccgggttacaagggcccagtaaacatgtcggcccacaagtcatacgtaacgccaccaaagattgttacggtctctttcctaaacggatgctgtatgaagcttttgcaacattgatgcaggcctgtaatgtcgacgagatttatgcggtaagtgaaaacaaccatgtttatcgtcaactcaggtacttattccagaagaaaaaaacttttgtggccagctatagtgaattctgggagtcgctaaacggcgttaagaaaggtgccttatatcatctgccatcacaggtgatgcgtaaagcgcctgaaagtatccccagcaaaaaacgcgcagagtatcggaaacgctatcatattctggatacaataatacaagaggttaacagcctctcccggtagaactatttcatacgcggatgtgcagatcctgctaccgttcagcggatctctttgaaatctgtatcgctactggatggttaaatacagaatggcttgcgagtgaatagcgcggcatttaaccgtcgctttcactcatgctatgatcaacatcttaatcttattcccttcaccataacgccatcgattagcatgttaaccattaaatacaagctaaacatttgtcacatttttatttggttaagcaaaaaaataatacaaaatagaattttcagtaaaccaagtcaggagttttggtgaaaatacaagaagttaagcgtatattaacccgctggcagccgtcttcctttaccctataccgggaggtgtttacgcaatacggcggtagtatcaatatgcacccagatattgttgattattttatgaagcgccataactggcattttaaattcttccactataaagaagatgataagattaaaggcgcctactttatctgtaatgatcagaatattggcatcctgacgcgcagaaccttcccgctatcgtcagatgagatacttattccaatggcaccagatttacgctgcttcttacccgatcgtactaaccgactttcggcgttgcatcagccacaaatacgcaatgccatatggaaactcgccagaaagaaacaaaattgtctggtcaaagaaacgttctcttctaagtttgaaaaaacacgccgtaatgaatatcagcgatttcttaaaaaaggcggaagtgtaaaaagcgttgctgattgttcttctgatgaactgactcatatttttatcgagttatttcggtctcgtttcggcaatacttcatcctgctatcccgctgataaccttgccaacttttttagtcaactgcatcaccttctgtttgggcatattctttatattgaagggataccctgtgcatttgatatcgtattgaaatctgaaagccagatgaacgtctactttgacgtatctaatggtgcaattaaaaatgagttcagaccactcagtcccggcagcatactaatgtggctaaatattaaccgtgccagacattactgccaggaaagacaaaaaaaattgcttttttccatcggcatactaaagcctgaatgggaatataagcgcatgtggtcgaccccctattttaccggaaaatcgatttgctaaaaagaaagcctggacgtaaatatgttttttacgtccagatttttcataagtcctgatgaactgataaaaaacgaaagtttaatcataatttgaaaaataagttaaccaccatataatcataatgacaattactcgaaattcacttacactacactcggttttacggaattgattaacacagtatgttacagataacgtgctaaaaagcgtgcagcggttatacattttcatatgtgtgtgtcattaacctggcgtcaggaacagatgatgatgacaactacccttttatctcttctggcctggcataccgtcagtagattaaaggtgtagccttgctttatggcattacaaaaatgtgggtgaggtctatgctcaatgtatacgttatttgtaacaacgctcttgtgcataaacaatacgttattgccaacagcactgaacgggtacagtggttcttgctgacaacaggcttaaagatcgccttaacacgggatacctgataactggattatattatgacacatgcagactggctgattcttgggtatacaactgttattattatttttggtattgtatgttatatcggattgcttaaattgataacgaaaggcaagcatgaaaaataacgcacttaccgggaagaatatactctcaggagataaaatgcttcggcaatgatatgacaccactgccgaaatgctatttttaaagaaatcaatcaggtattgagggtgattttatcatagccgcgccagcgataattcaacaacgagagcagccagaatagcacaaaagcacccactacccagaagcccacattccccatatgatcgttaagcgtgctgacggtctgccaaaatgttccgcttaactgtaacgcatcatcaatcaaccccagcgcctcaagcccgccaatcgccagcgcgacaatgacggatgcggcggtaatggtcatattataataaagcttgcgtaatggatgcgagaaagcccaaccgtaagcgccgaccatgacaaagttatccagggaatctaccagcgccatcccggcggtaaacagcacaggaaaaatcatcattgaccagagagatagcccctggttggctgctgaagcggaaatgcccagcaacccaacctcggttgcggtatcaaatcccagaccaaacagaaaaccgacaaaatacatatgccaactggaagtgaccaaacgaaacgtacgctgaaatatacgcgtcatcagcccgccaggtatggcctcgtcatgcgccctcactgactcgccgcgggtaaccgagcgaaattgccgccagacgttgaacaaaataaacaggttaagcagggccatcgccagcagaaaaaaagcggaaacagccgtaccaatcaacgaaccatattgatgcaaaacatcaatacgatcgcgaaatgccatcgacgtcacaacaatcgccagacatgccagaacgacaatggtcgaatgacccaatgaaaaaaacgcccccacgcctaaaggcgttttaccctgctgcatcagtttacgggtgacggtatcgatggctgcgatatgatcggcatcaaccgcatgacgcagcccaaagctatacgccagtatggctgcacttagcatgactgcatggtgatgaaaaacacagaacgcccaaatccaggccaggatgttaaccccgacaagaaagacggttaatgctattccccgtcgtttagtatgattattcatgcccctgcacccactatatttttaattaacgctacggtttgtagggggaatgtatgattatttgattaaaacgtcacacctcaagatgcgactttttgtaaacgtgctttaccgctgacacatttgtgcgcattactgcggaacaaggcttaaaaagcgtatccgaacgtataaccctcccaacgcttcactacgggaaaaatggggatgagtacggtgcaggcgtgcaatatcattgaccaaagccagaccaatgcccgccccggccacatttcctacgttatcgagccggtggaacggctgtagcgccagatggatgtgttcatcatcaatgccggggccgctatcttcgacaaccagcgtcacggcatcgccatcccgttcaagccgcgcggtgacgataccttgctcaggcgtgtatttcagcgcattatccagcaagtttccgcatagctcgctaagcagtacctcatccccctcgatccacatcgcttcctgttcgccttcgtagcccaggtcgatatgtttactccgcgcctgcgccaggcgggtaaagcagccgctctgtacgatatcgtacagattcaccggggaaaagcgccgctcgccctgctctttatgctttaccgcagaaagttgcaacaatctttccgtgagctgaatggtactatccagcgttacgctcatcgcctgcagactttcgtaccaatgatgagggtgctggctggctaacgccaccgccgcctgcgtttttaacaccgccagcggcgtttttaactggtgagaagcatcggcactaaagcgttcctgccgggagagaatgccgcggagcctgtcaatgtagcgattaaacgccacgattaacaagcgtgtttccgaccacggcagcagttccggcagcggcgttaacagacccggttcgcggcgtaccattaatgacgaaagttgacgcatagggcgcaggatccggcgtaataaccagccaaccagcaccagggtcagcaacaccagcagcccctgtgagatccaggaagagaacagcagttggcccgccagataacgacgggactgcagcgtctctgcgacataaatctccgccatgccgataatgccgccttcgttgaccggctgtagcaaacgcgccacgcggatcgcctcgccgcgatactcggtatgatagaaccacgccagcgccggataaagccgggtacggggcgtagcgggcggcatgacgggcagatcgtcataaccggaaatgacctttccggaagggtcgacgactttgtaatagagtcgatcattcatattaagctcgaagctatccagcaccacccagggcacgttaacttccagatggttattgcgcaccaccagccgttccgataccgttcgcgccgaggagagcaacgtacgatcataagcctgagtggcggcctgtagcgcattgacatagctgttaaacgccgacagcccccatagcagaatcagcggcaaccccaggaacagtaagagttgcaggtacaacgattgcggcttaacccacttcatcgccgcgctccagcacataacccaggccgcgcagcgtcgtaattcgtacatcgcttccctggagttttttacgcagtcgatgaatataaagttcgatgctttcagggcttacctcatcgttcaggctgaacacctgttcaaaaagctgctgacgcgaaaccggccgcgttcgtcggtacatcaatacggttaagagcgcctgctcacgcggcgtcagcgctaacggctgtccctgtaacagaaaatacccttcatcatgaaagatcaattcccccagttgctgaacttcatgaacctgcccagcgctgcgtcgcagcaaggcccgtaaacgggcatccagctcttccagttcaaagggtttcggcagatagtcatcggcgccgacgttgagaccttttacacgatccgccaccgcgcttcgcgccgtgagcagcaaaacgggcaaggtctgaccgcgtttacgcagccgttgcaccacctccagtccatccattcccggcatattgatatccagcaccgccagcgcgtacatttcactgtgcagaagatggtcagccgccaggccgtcaaatacgcagtccacggcaaagccgttttgcaccagcgctttctccagccagtgagccagctcacggttatcttccgccaataagagacgcatatcacatcctgtaaagtttctgccgcattgaaagggaattgaaaggttattgttttaacaatcacgcaaccgaactgctacatgtcggctcacataatcacaaaaatcttcttccgaacctgaaaaatccggacgtccggcgtgaggataaaaaatgaaaaaacaattacttcgtacccttactgcaagcattttattaatgagtacctctgttctggcgcaggaggcgccgtcgcgaacggaatgtatcgcgccagccaaacctggcggcggtttcgacctcacctgtaagctgattcaggtgagtttgctggagactggcgctatcgagaaacccatgcgggtaacgtatatgcccggcggcgtcggcgctgtggcctataacgcgatagtcgctcaacgccctggcgaacccgggactgtggtcgccttttccggcggttcgctgctcaacctgtcgcaggggaaatttggtcgctacggcgtggatgatgtgcgctggctggcaagcgtgggcactgattacggcatgatcgccgtgcgtgcggattccccgtggaaaacgctgaaagatctgatgacggcgatggaaaaagatcccaacagcgtggtcattggcgctggcgcctctattggcagccaggactggatgaagtcggcgttgctggcgcaaaaggcgaacgtcgacccgcacaagatgcgctacgttgcctttgagggcggcggcgagccggtgacggcattaatgggcaaccatgttcaggttgtctccggcgatctcagtgaaatggtgccttatctgggcggcgacaaaatccgcgtgcttgccgtcttttcagaaaatcgtctgccgggccagcttgccaatgtccctaccgctaaagaacagggttacgacctggtgtggccgattattcgcggcttctacgtcgggcccaaagtcagcgatgccgattaccagtggtgggtggataccttcaagaagctccagcaaaccgacgagtttaaaaagcagcgcgatctgcgcggcctgtttgagttcgacatgaccggccagcagctcgatgactacgtgaaaaaacaggttactgattaccgtgaacaggcgaaagccttcggactcgcgaaataatcgcggaggcaatgatgagcgatcgtatctttgcgggtatctggctgttgctctgtatcgccgggctattcatcgcctggcagatccaaagcgaatacagctatgaacccgtcggcccccgcccttttccgctggggattatcggcctgatggcgctctgcgcgctggcgctgttattgcgccatcccgacacggtgagctggccgcgccgccatgttctgcaaaagctaattaccatgatcatcatcctgctgatgtatgcctggggattcgaatggctgggttttcccatcgccaccgcgcttctcaccatggttatcgggatgctgttcggcgccacgattccggcggcgggtatctccggcgcggtattgggtattctgctgtggtatgcctttgaccggctgcttgatgtcaccttacctctcggcgcctggctgagttaacggagcaacgatggatacctggatatatctttctcagggctttgcggtggcgatgacgccggaaaacctggttatcgcgttgattggctgcttcgtgggcacgatcgtcggtctgctgccgggcctgggaccgatcaacggcgtggcaatcttactgccgctggcctttgcgttgcatctgcctgcggagtcggcgctaattctgctggcgacggtgtacattggctgtgagtatggcggcaggatctcctccatattgctcaacgtccccggcgatgcggcggcgatcatgacggcgctggacggttacccaatggcgcagcaagggaaaggcggcgtagcgctgtcgatttccgcagtcagctcatttttcggttcattaatcgctatcggcggcatcattctgttcgcccctttactggcgcaatggtcgctggcctttggtcctgcggaatatttcgccttaatggtttttgccatcgcctgtcttggcagcatgatggcgcaaaacccgcttaaatcatttctggcagcgctgatcggtcttggccttgcgaccgtcggcgtggacgccaacaccggggtttatcgctttacctttgacagcgttcatctttccgacggcgtacagtttatcgtcgtggtgatcggcctgttctcggtatcagaaatacttttaatgctggaacataccagcagcgggcaaacaatggtccgcaaaacgggtcgaatgttgttcaacctgaaagaaggcgcgcagtgtatcggcaccaccctgcgttcttcggtaatcggcttttttgtcggcgtattgcccggcgccggggcgaccattgccagcgccattacctatatgaccgagaaaaaactcagcggcaacagcgatagcttcggcaaaggggatattcgcggcgtcgcggcgccggaggcggcaaacaacgcctcagcctgcggctccttcatcccgatgctgacgctgggcgttcccggttccggtactacggcagtgatgatgggggcgctgacgctgtacaacatcacgccaggcccggcgatgttcaccgaacagccggatatcgtctggggactcatcgctgcgctgctgattgcgaacgtgatgctgctgatcatgaatatcccgttgatcggtctgttcacccgtatgctcaccattccgctgtggttcctggtacccgccatcgctgccgtatcggcggtaggggtgtatgcggtacacagcaccaccttcgatctggtgctgatggtcgcgctcggcgtgttagggtacattttacgtaaaatgcacttccccatgtcgccgctgatcctgggattcgtactgggggaaatgctggagcagaacctgcgtcgcgcactctccatcagtaacggcaatatggcgattttgtggcaaagcggcgttgccaaagccctgctgatcatggcgatcatggtcattgtcgtaccgccagtgttacgtctgctccgtaaacacagccgtaaaccgcaggttgacgccggttaattgactgctgaaatacgttgtacttgtccggcctacgcgctcatgtgtcaggccgggcaaccccgccagcatcactttccccataacgctctcattttacaccccttcttgccgttgtcaggctcgtggcgccgttaacctcaccctttgtattgttaaatatttgttgtttttgatcacaataattaaacaaaagcggttatttcatacgcgttcctggaaaatgtcgatatttttaatttatggctacgaaatgagcatcgccatgtctccctgaccatcttaccgagaggaatgattctaatgaatgcactgactgccgtaaaagcgaacacagatgatttagcccaacgccatactggtttcacccttgccccttcggcgcagtcgccgcgtctgctggcgttaacgtttacggcggataccacaagacaatttctccatcaggttgcacagtggccggtgcaggcgctggaatacaaatctttcttacgtttcaaaatcggcaagatcctcgacgatctgtgcggcaatcagctacaaccgctgttgatcaaaacgctactcaatcgtgcacaaggcgcgctgttgatcagcgccgaagggctcgatgatgtcgcacaggcagaagagatggtcaaactggcgacggcggtggcgcatcttattggtcgctccaactacgatgcgatgagcggccagtattacgcgcgtttcgtggtcaaaaacgtcgacaactccgacagttatctgcgccagccccaccgcgtaatggaactgcacaatgacggcacctatgttgaggaggtgaccgactacgtgctgatgatgaaaatcgacgaacaaaatatggaaggcggtaattcgctgctgctgcaccttgatgactgggaacatctggagtcgttttttacccatccgctggcgcgtcgcgtcatgcgctgggcggcaccgccaagcaaaaatgttagccatgacgtctggcacccggtgtttgatgtcgaccaacaaggccgcccggtcatgcgttatatcgaccagttcgtccagccaaaagactttgaagaaggcgtctggctcagcgagctttcagacgcgctggaaaccagtcaaaacatcctctccgtgccggtaccggtcggcaaattcctgctgattaacaatctgttctggctacatggacgcgatcgttttacgccgcatcctgacttgcgtcgcgaactgatgcgccagcgcggttacttcgcctacgccgccagccattatcaaactcaccaataagcgccacggcgaaggaattacgcggatgtatgattttgtgattatcggcggcggcattatcggcatgtcgaccgccatgcaacttattgatgtctacccggatgcgcgcatcgcattgctggaaaaagagtccgcgccagcctgccaccagaccgggcataacagcggcgtgagccatgccggggtgtactacacgcccggcagcctcaaagcgcggttttgtctggcgggcaatcaggcgaccaaaaccttttgcgatcaaaacaacatccgctacgacacctgcggcaaaatgttggtcgccacctcggagctggaaatggcgcggatgcgcgcgctatgggagcggacggcggccaacggcttagagcgcgagtggttaagcgcggcggagctgcgtgaacgcgaacccaatatcattggcctgggcgggatttttgtcccttccagcgggattgtcagctatcgcgatgtcgcgacggccatggcgaaccgctttcaggccaaaggcggcgagatcatctaccatgccgaggtcagcgcgctaacagaacatgccgctggcattgttattcgcacctcgcaaggtcgggaaatagaaaccgctacgcttatcggctgtgcagggctgatggcggatcggctggtcaaaatgctgggcgtggagcccggttttattatctgccctttccgcggcgagtactttcgtctggccccgcgacacaaccggatcgttaaccatttgatctacccgatccccgatccggcaatgccgtttctcggcgtccatcttacccgcatgatcgatggcagcgtcacggtcgggccgaatgcggtgctggcgcttaaacgcgaaggctaccgtaagcgcgacgtttccttcaccgacaccctggagattttccgctccgccggcattcgccgcgtactgcaaaaccatctgctttccgggctgggcgagatgaaaaactcgctgtgcaaaagcggctatttgcggcgagtacaaaagtattgccccagcctgaccgtcaacgatctccagccctggccggcaggcgtgcgggcgcaggcggtttcaccggacggcaaactgattgatgattttctgtttgtcacgacgccgcgttccattcacacctgtaacgccccctccccggcggcgacatccgcgatacctatcggcgcgcatatcgtcagtaaagttcaggcgctacgcgcaagccagagcaaccccggacgtacgctgcgtgcggcacgcagcgtggacgcattacacgccgcatttacccgttaacccttcagacaggaagcaattatgcaacttaacgactctaccctgttccgccagcaggcctttatcgatggcgactggcgcgacgcgcgcggcggcgatgtcatccccgtgagcaaccccgccaacgggaaaccgctcggcaatgtgcccaaaatgggggcggaagagacgcgcgacgccatcaacgccgccaatcgcgccctgcccgcctggcgcgcgctcaccgccaaagagcgagccaatatcctgcgtcgctggttcaatctgatgatggaacatcaggacgatttggcgcatctgatgacgctggaacagggtaaaccgctggcggaagcgaaaggcgaaattagctacgccgcctcgtttattgaatggttcgccgaagaggggaagcgtatctatggcgacacgattccaggtcatcaggccgataaacggctgctggtgattaaacagcccatcggcgtcaccgccgcgattaccccgtggaactttccctcagcaatgatcacccgtaaagccggccccgcgctggccgcaggctgcacgatggtactcaaacccgccagccagacgccgttttccgcgctggcgctggcggaactggcccggcgcgccggaattcccgcaggtgtatttaacgtcgttaccggttcggcaggcgatatcggcggcgagctgaccagcaacccgctggtacgcaaactgtcgtttaccggctcgacggagattggccgccagctaatggaacaatgcgccaaagacattaaaaaagtgtcgctggaattgggcggcaatgcgccgtttatcgtctttgacgatgccgatctggataaagccgtcgaaggcgcgctggcttcgaagtttcgcaacgccgggcagacctgtgtctgcgccaatagattgtatgttcaggacggcgtttacgatcgttttgcggaaaaactcaaccaggcggtaaataagctcgcggtcggcgacggcctgcaagccgacgtcgctatcgggccgctgattgatgaaaaagccgtggcgaaagtccaggagcatatcgccgacgcgctggaaaaaggcgcccgcgtcattacgggcggtgaagcgcacaaattgggcggcaacttctttcaaccgaccattctggcggatgttcctgataacgcgaaagtcgccaaagaagagacattcgggccgctcgcgcctctgttccgcttcagcgacgaggcggatgtcatcagacaggctaacgataccgagttcggcctggcagcctatttttatgcacgcgatttaagccgcgttttccgcgtcggcgaagcgctggaatacggcatcgtcggtattaataccggcattatctccaacgaagtcgcgcctttcggcggtattaaggcctccggattaggccgtgaaggttccaaatacggcatcgaagattatttagaaatcaaatatatgtgcatcggcctttaacaggagagtcgctaatgaataccaataacgctttaatgcagcgccgtcataacgccgttcctcgcggcgtgggccagattcacccaattttcgccgagcgggcggaaaattgtcgggtctgggatgtcgaaggccgtgagtatctcgatttcgcgggcggcattgccgtcctgaacaccggtcatttacatccgggcattgtttcagcggtcgaagcgcagttgaagaaattgtcccatacctgttttcaggtgctggcctatgaaccgtatctggcgttgtgcgaacgcatgaaccagaaggtaccgggcgatttcgccaaaaaaacgttgctggtcacgaccggttcagaagcggttgaaaacgccgtgaaaatcgcccgcgcggcaacaaaacgcagcggcgctatcgcgtttagcggcgcttaccacggtcgtacccactacacgctctctctgaccgggaaagtacacccgtactctgctggtatgggattgatgccaggccatgtctaccgcgcgctttatccttgcccgctacacaacgtcagcgacgacgacgcgatcgccagcattgaacgcatctttaaaaatgatgccgcgccggaagatatcgccgccattattattgagccggtacagggcgaaggcggattttacgccgcctctcccgcgtttatgcagcgactgcgcgcgctatgcgaccaacacggcattatgttgattgccgacgaagtgcaaagcggcgcgggccggaccggtacgctgttcgccatggaacagatgggcgttgcggcagatattaccacgtttgcgaaatcgatcgccggcggctttccgctggcaggcgttaccggccgggcagacgtgatggacgctatcgcgccgggcgggctgggcggcacctatgccggaaacccgattgcctgcgccgccgcgctggcggtactggacattttcgagcaggaaaatctactgcaaaaggcgaatacgcttggcaaaacgctgcgcgatggcctgatggagatagcggaaacgcaccgtgagattggtgacgtgcgcggactgggcgccatgatcgccattgagttgttcgaaaatggcgaccccggcaaaccgaacgcggctctgaccgccgacattgtggcccgcgcccgcgagaaagggttaattctgctctcctgcggtccttactacaacatcttgcgcatcctcgttccactcactattgaggcctcgcagattcggcaaggcctggagattatcgcccagtgctttgatgaggcgaaacaagcgtaatgtccaataagcagcgtcgggtggcgacgtaactgtcttatccggcctacaaaaaccgtttcgattgtaggccgaataagccaggcgccatccggtaaacgagcgcaataacaataaagaggttttaggatggggcaattgtcagaatcacatgcattagggggcgggctgaaatcacgccacgtcaccatgttatcgatcgccggcgtcatcggcgccagcctgtttgtcggttccagcgtggcgattgcggaggccggccctgcggtactgctggcctatctgttcgcaggacttttagtcgtcatgattatgcgaatgctggctgaaatggccgtcgccacaccggataccggttctttttccacctatgcggataaagcgatcggcccctgggccgggtataccatcggctggttatactggtggttttgggtgctggttattccgctggaggccaatattgccgccattattctgaattcatggataccgggtattccggtatggctattttcattagtgattacgcttgccttaaccggaagcaatttattgagcgtcaaaaattacggcgagttcgaattctggctggcgctatgtaaagtaattgccattctggcgtttatcgcgctgggcgcgacagcgattagcggtttttatccgtatgctgaggtaagcggtatctcccggctatgggatcacggtggttttatgcctaacggcttcggcgcggtgttaagcgccatgttgatcaccatgttctcttttatgggcgcggaaatcgtcactattgctgccgcggaatccgatacgccggataaacatatcgtacgcgccaccaattctgttatctggcgaatttccatcttttacctgtgttccatttttgtggtggtggcgctgatcccgtggaatatgccgggtctgaaaagcgtaggttcgtaccgttcggtactggagctgcttcatattccgcacgcaaaattcattatggactgcgtgattttgttgtcggtgaccagttgtctgaactccgcattatataccgcctcccggatgctctattcccttagccgccgcggcgatgcgcctgcgataatgggaaaaactaaccgtagcaaaacgccctgggtggcggttctcctctctaccggcgcggcctttttaaccgttatcgtcaattattacgccccggcaaaagtgtttaaatttcttatcgacagttccggcgccatcgcgctgctggtctatctggtgattgcgatttcgcaattgcggatgcgtaaaattctgctggcgcagggcggagaaattaagttgaaaatgtggctttatccgtggctcacctggctggttatcggctttatctgctttgttctggtggtgatgctatttcgaccggcacagcaactagaagtcatttcaacggggctgttagggctgggcataataggtactgtccccattatgtctcgctggaaaaaactgataaggtggcaaaaagcccccctgcaaaacctacgttagttattcccggcgtcagccgggaagcttctcaggagtaaaagatgaccgccctttcccaaccgacggccatagatggctatcgctggcttaaaaatgacattattcgcggcacttatcagccggatgagaaactgcggatgagtttattaaccgcccgctatgcgctcggcgtagggccgctgcgtgaggcgctgtcgcaactggtggcggaacggctggtcaccgtggtgaatcaaaaaggctatcgcgtggcatccatgtcagaggcggaactcctcgatatttttgacgcgcgcgccaatatggaagcgatgctggtacgcctggcgattgaacgcggcgatgatgcgtgggaggcggagatcctggcgcgagcgcatatgctcagtaaactggaagccagcgatgccagtgaacatatgctcgatgaatgggatcagcgccaccaggcgttccattccgccattgtcgccgggtgcggctcccactatctgctacagatgcgcgaacgcttatttgacctggcggcccgctaccgctttatttggttacgtgaaaccgttctgtccgtcgagatgctggaagataaacatatccagcatcacacgctaaccgaagcgatactggcgcgcgaggcggcacgcgccagcgaattaatgcgtcagcatttgctgacgccgattcccattattcgccaggcgatggcagggaaaatgtagcctggcgcgacctgatagccattattcttcaggaatacgcaacacttgtcccggatatattttttccgggcttttcagcatcggtttatttgcctcgaagattttattatacagattggcgttaccatacacttgctttgaaatagcgctcagggtgtcgcctgattttacggtataaaactgactttcagccgctggcgtcgtggttttaacctgatcgtcaacgctgctaatcccggcgatattccccacggcaaccagaattttttcttttgcctcctgactcagcccatcccccgtcactgtcgcttttccatcagctatttgcacattcactttgtcagcgtcgggtattcccgttttatttaaatgttcctggacttttttcgcctgatcgtccttatcatgattagcggttaccgcgtcccagagtttttcacctgcatcttttacaaaattgaaaagtcccatattcacctcgcttgtcaaaaatacacacaaagaaaagtgtagcagagggaatgaggttatcctgataagcggcgcttatgcgccgccggtggccggtaattaatgacgcatctgaacccaaaatgcgtggataagccccggaatatatccgagtaatgtcagcaggatattaaggataaatgcccaaccgaacccttttcctaaaagtacgccgagcggaggcaaaataatcgtaaatacaattctccagaaacccatatacactccatacaagcaaaattagtcattgtttaaaaagagattttatctctaagcatagtcagtttacctgagcctgccagtcgcgcgccgcgcttttaccctcctttacgctttttacgctggcatcaggttgatgtttattttagaattaactaaatttagaaaatacttaaataactatgacagagcttgaacaacttcaggccagcgcagaacaggcggcggccctgctcaaagcgatgagccacccaaaaagattactgattttatgtatgctttgcggttcgccaaaaaccagcgcaggcgaactggcgcgcattaccgggctaagcccctccgcgacgtcgcaacatctggcgcggatgcgggaagaagggctgattgatagtcaacgcgatgcccagcgcattcactatttcattaaaaatgaggcggttaatacgattatcgccacgttaaagaatctctattgtccataaggaggcacgatgtccattgggatagtttccccccgtgaggcgcaagcgctgatagcgcaaggcgcgaaactgattgatgtacgcgacgccgacgaatatctgcgcgagcatattccacatgcgcaactggcgccgctttcccggcttgaacagggcgatttgcccgccaacctgcgagcggaacagattatttttcactgtcagtcaggtaaacgaaccagcagcaatgcagcaaaactacaggccattgccgcccctgctcaggtcagtctactggaaggcggcatcgacggatggaaagcggcaggattgcccgtcacagaagacaaatcgcaaccgttgccactgatgcgtcaggtgcaaatcgccgccggcgggttgacgttgcttggggtgattctgggctatacggtccacggcggctttttcctcattagcggttttgtcggggccgggttaatgctggcaggcatgaccggcttctgcggaatggcgcgactactggaaaaaatgccctggaatacccgtactcattaagcggtaccttcaccgcgcgtcggtaggtgtgtagtagactgaaggcgggtttataccattgttcaacaggagagcgtgatgttcacaccaggcgatatcgtacagccccgaatgggtgggccgaaactgaaagtgattgaagtcaacgaggatcatattgtcgcggtacaggtcggtaatgagcagggcgaaaaattgatcctcaaagcggcagatgtcaccccctattgcgaagagggcgattttggcgtgtgctgatttatcagaatgagcatggcgcaacgttccctgagccccggttaatagagacaggaaacgcagcgccatctgttaaaggttatccgtgattagattaagaaatcatccagagatttccccgccgccagcgcctgggcaatcggtttaggcgtacggccttgtccggtccaggttttttcttcgccattgaaatcagtaaaacgatattttgccggacgcggctgacgctttttagcagaacgcggcattgctgaatccatggcaaataactcttccgggttaataccgtctgctttcatcagctccagaaaggcattaattttctcctgcttctcggcaagctggcgttgctgcaattcttcttcttcgcgtctttctttagtgacaaccctgaatttttcgagcatttcttcaagaacgtcaatggagaattcgcgagccatagcgcgcagcgtgcggatattatttaagttctgtaacatcaaattcatatcaataaaaaccttttaacgcagaaaacaaaaactattacaggcggtattgtatgcgattattgattatatttccagatcctaaagttcatacagatatactcagtataactcgattaattatattaatctgttaaccagaaggttatattcattaccccctgtgtgtttcaggttattctgcctacggtatatctgtaggtttcccgttcggctgtttatagcgtattgcgtatctcagtaaccacggcgaccctcacggtggctgaccttatacagaagtgaatatttcatcacaataagagattaaccattcaaaaatcatcatcagagctttatgctaaaaatcagcctgcaatagctataattatgctgagaaaagtagagcgcgtgccgttagccgagaatacatcgcatctgacaacatttggaatgtggctgaaaatcgccagaaaaacaatgcattataatgcattgatttaaaagtaattaatgactaacaacaacgaaaatctcgccgcgagcaaaaaacacacaatcacagagtattttatcgacaaaaagcctataaataaaaatattacactagttgatagttattatatagggatatactctatgcaaagacaaaagtgctttatgatttcactaccaaccatcacctcattctgatcgatacgctacaaggagcattaacatgttctctccacagtcacgcttgcgtcatgccgtagcagacacgtttgcgatggttgtttactgttctgttgtgaacatgttgatcgagatattcctctccggaatgagctttgagcagtcgctttcttccaggctggtggcgatacctgtcaacattttgattgcatggccatacggcgtttaccgcgatctgattatgcgcgtcgcgcgtaaggcaagcccggcgggatgggccaaaaacctggcggatgtattggcttatgtcacctttcagtcacccgtttatattatcatcttgctgaccgtcggtgccggctggcatcagatagtggccgccgtgagttcaaacattgttgtttcaatgttaatgggcgcggtttatggctacttcctggattattgtcgccgcctgtttaaagtgagcagctatcatcaggctaaggcgtaagttagcgtcgcgactggcattgccagtcgcgcttttagtcggttttttcgtcgccaaaaagcccattcagataacgttctaacgctattcgggagctaaagccgtggggaataccgtaatgttcgtgggtctcgccgcctaaatagagcggaaaattttgatagtgatcgcaggttttaatatccgaagccgggtcagccagtgatgagctacggtcttttaatctggggtgaatgatcagcgcggtacgccccatacgcgcctcgcggttaacataaacataattctcgccgcgtcgataaccatacgtcttattcgtcaccacatcgacggtaaaccctgccttttccagtacccgcgccacctcgtcaggtcgtaaatacatattttatcctcattctcttttactgcgggcttaccttacccgatagcgcgttatcaacgctttcagaaaagtccagaaacgcatgatatcgccgtaacaagcctcagcaggtaaaaatatgaactacactgaaagctacatcgaaatcaatggaggatcatatgcttaacaaaccgaaccgaaacgacgtcgatgatggtgttcaggatattcagaatgatgtcaatcgattagccgacagtctggaagatgtccttaaatcctggggaagcgatgcgaaagacgaagccgaggctgcgcgacgtaaagcacaggcgttgctgaaagagacccgggcgcggatgcatggacgtactcgcgtaaaacaagccgcctgtgatgcgatggggtgcgcggatacgtttgtgcgtgaaaaaccctggtgtagcgtaggaaccgccgcagcggtaggaatttttatcggggcgttgcttagcctgcgtcgctaacgacgtgcgctgccggatggcgacatactttattgggcctgcatcattgccgcaggcccaggtcgcgccattcggcgaaacggttactgtatcgcctgtcgaagctgccatgcgacctgtttcgccatggcggcggaagtaatattggtaaacgacagtaaaatgcccccctttcctgacgaaaccactcgccaacggcttagcgcctgtaccgccagtccggcctgattcgctttcgctacctgcgctttatcatcgccttcaacctcaataaccagttgaataccgcctttctgtaatgtcacgacaaatccctgttctgccagcgcctcttcaatccataaccgtcgctgagcataatgttgacgcatctttttcagatgccgccagaaatggccatcacggataaaatcagccagcgtgtgctgccataacaacggtacgctacagggcatcagcgacgcctgctggcggaaatgctcaatctgctttatcggcaccaccagccaggcggtacgtaatgccggaaagagcgacttactgaacgttccggcgtaaatcactcgctgcggggcatccagactcttgagcggcggaagcggtttaccgtgataacgaaattcgctgtcgtagtcatcttcaataatccaggcctgcacattcgccgcccatgccagaagttgccgtcggcgagttaacgacagcgccacccccaacggactttgatgggcgggcgtcaccaatgcaaagcgcccctgcgggcaatcccgcatccccgccgcgacattcagcccatccgcatcgaccggaatcggcgccagcgtaatcccctcctgcgttatcaccgggcgaattaacggaaaaccgggatcttccacccacatgctgtctcccggcacagacaatgtacgcaggattagccgcatagaatccgcatatccggaggtaataaatacctgttccggcaggcattcaatgctacgcgaaacccgcaggtaatcgactatcgcctggcgcaaaatcgcctcgccgcagacgtcgcctaatgccagatcgaagcgcgtctgcgtgcgcaaccgacgccccatcactcgcgcccacttctcgcgtggaaagagatccagcgccggtaaccccatctgaaagggtttcggttccggactttctccggcaaaaacagcgggtatcggcggcgccgtctcaaaccgtagagcgttgctcacaaacgtgcctgcctgaccacgtcgctccagccagccctgcgccaccagctcgccataggcattttccaccgtggcgcgagaaacgcccagttcctgcgcccacgtccggctggaaggcaagcgcgttccgggcgcgagttctccttgctcaatggccgtttttaactgacgagcgatgtgctgatagcgcggcatatggtctgctttttctgtaaaaatatggctctcttttacagaccattatagtgctacagtgctcgtcatcaacacgaggagaaacatgatgacgacgttacgccaaccctattatgaactgagcccggaggtttacagcgctctggtgcaggcgaaaaacgcgctggaaaagagcacgattgaccccactctgatggagctgatttacctgcgtgtttcgcaaataaatggttgtgcattttgcctggagatgcacagtaaagcgctgcgtaaggctggcgtgaatcaagctaaattagatgcgctggcaggatggcgggtaagccaccatttcaacgagcaagagtgcgcggcgttagcctgggcggaatcggtgacgcacattgctgaaacccacgccgaagataatgtttacctgccgctgctcgatcatttcagcgcgcgtgaaatcagcgatctgaccttcgctattggtttaatgaactgctttaaccgtctggcgatcggtatgcgaatgtgacgcattgttgccggatggcgctgatgtcagccaactctgttatgcgtcaacctgcaggccggagcgggcgttcatgccaccatccggcaaaaattagccatgccacccctaccccgctgcgttcatcagcgacgttaaaatcaatcgaaaattcccatatcttgtatggttgaatcttaattcaactacatctagtatttcgtgtatcaacacacgacaatccgacgcgtttcatcgcgccgttttctcattttaaatggaaatacgaatcatgagcattactatttacactcgcaataactgtgttcagtgccacgccacaaagcgggcgatggaaagccgtggatttgaatttgagatggtgaacgtcgatctggtgccggatgcagcggatacgctccgggcgcaagggtttcgtcaattaccggtggtgatagcgggcgatttgagctggtctggcttccgtccggacatgattaaccgtctgcacccgacaccccacgcggcaaacgcatgagcgcgctcgtctacttctccagcagctctgaaaatacgcaccgttttatgcagcgtctggggctgcccgccacgcgtattccgctcaatgagcgggagcgaattcaggtagacgaaccgtacattctggttgtgccgtcatacggcggcggcgggatggccggtgcggtgccgcgacaggtgatccgctttttaaatgatgaacacaaccgggcgcgcattcgcggcgttatcgcctccggtaatcgcaatttcggcgatgcctggggatgcgctggcgatgtgatagcacaaaaatgcggcgtcccctggctgtaccgctttgagctcatgggcacacaacgcgacatcgataacgtccgaaaaggagtaaatgaattttggcaacaactatcccggagcgcgtaatgcaggaaaccatggattaccacgccctgaacgcgatgctgaatctttacgataaagcaggccatattcagttcgacaaggaccagcaggcgatcgacgccttctttgccacccacgtccgcccgcattccgtgacgtttgccagccagcatgaacgtctggagacgctggttcgggaagggtattacgatgacgctgtcctcgcgcgttacaaccgcgccttcgtcctccgcctgttcgagcacgcccacgccagcggctttcgcttccagacgtttcttggcgcctggaagttctataccagttacacgctgaaaaccttcgacggcaaacgttatctggaacactttgaagatcgggtgacaatggtggcgttgacgctggcgcagggtgacgaaacgctggccacccaactgaccgatgaaatgctttctggtcgctttcagcccgctaccccgacttttttaaattgcggtaaacagcagcgtggggaactggtctcctgcttcctgctccgtatcgaagacaacatggagtcgatcgggcgggcggtgaattcggcgctgcaactctccaaacgcggcggcggcgtcgcgtttttactctccaatctgcgcgaggcgggcgcgccgatcaaacgcattgagaatcagtcttccggcgtgatcccggtgatgaaaatgctggaagacgcgttttcgtatgccaaccagcttggcgcgcgccagggggccggcgcggtttatctccatgcgcaccacccggatattctgcgttttctggataccaaacgggaaaatgccgacgaaaaaatccggatcaaaacgctctctctcggcgtggtgatcccggatatcaccttccggctggcgaaagaaaacgcgcaaatggcgctcttttcgccctatgacgtacaacgacgctacggcaaaccgtttggcgatatcgccattagcgaacggtacgatgaattaattgccgatccgcacgtgcgtaaaacctatattaacgcccgtgacttttttcaaacactggcggagattcagttcgaatccgggtatccctacatcatgtttgaagatacggtaaaccgcgcgaatcccattgctgggcgcattaatatgagcaacctgtgctcggaaattttacaggtcaatagcgcctcccgttacgacgataaccttgactatacccacatcgggcatgacatttcctgcaatctcggctcgctgaatatcgctcacgtcatggattcaccggacattggtcgtaccgtagaaaccgctattcgcggcctgacggcggtgtcggacatgagccatatacgcagcgtaccctcaatagccgccggtaatgccgcctctcatgccatcggtctgggccagatgaatctgcatggctatctggcgagagaaggcattgcctacggttcgccggaggcgttggatttcaccaatctctatttttacaccattacctggcatgccgtgcatacttcaatgcggctggcccgcgaacgcggcaaaaccttcgccggatttgcgcagtcgcgctatgccagcggcgactattttacgcagtatttacaggacgactggcaaccgaaaacggcgaaagtcagaacgctatttgcccgcagcggcattacgctgcccacacgagaaatgtggctaaagctgcgcgacgatgtgatgcgctatggcatctataaccaaaatttgcaggcggtgccgccgaccggttcgatttcttacattaatcatgcgacctccagcattcatccgattgtggccaaaattgagattcgcaaagagggcaaaaccgggcgtgtgtattaccccgcgccgtttatgaccaatgaaaatctggacatgtatcaggatgcttacgatatcggtccggaaaaaattattgatacctatgccgaggccacgcgccacgtcgatcaaggactgtcgctcaccctgtttttccccgataccgccacgacccgcgatatcaacaaagcgcagatctatgcctggcgaaaaggtattaagtcactgtattacatccggcttcgccagttggcgctggaaggtactgaaattgaaggctgcgtatcctgcgcgctataaggaaagccatatgaaattatctcgtattagcgccatcaactggaacaagatccaggacgacaaagatctggaggtgtggaaccggctgaccagtaacttctggctgccggaaaaagtgccgttatcgaatgatattccggcctggcagacgctgagcgccgccgaacagcagctcaccattcgcgtgtttacgggacttacgctgctcgacactatccagaacatcgcaggcgcgccgtcgttaatggcagatgccatcacgccgcatgaagaggcagtgctgtcgaacatcagctttatggaagcggtacacgcccgctcttacagttctattttttccacgctgtgccagacgaaagaggttgatgccgcctacgcctggagcgaagaaaacccgccgcttcagcgtaaggcgcagattattttggctcattacgtcagcgatgaaccgctaaagaaaaagattgccagcgtctttttagagtcttttctgttctattccggcttctggctgccgatgtatttctccagccgcggtaagctcacgaacactgccgacctgattcgtttaatcattcgcgatgaagcggttcacggttattatattggttataagtatcagatagcgctacaaaaactatcggcaatcgagcgtgaagagttaaagcttttcgcgctggatttgttgatggaactgtacgacaacgaaatctgctacacagaagcgttatatgcggaaaccggctgggttaacgacgtcaaagccttcttgtgctacaacgccaataaagccttaatgaacctgggttatgaggcgttatttccgccagagatggctgacgtgaatcccgcaatccttgccgcgctctcgccgaatgccgacgaaaatcatgatttcttttccggatcaggttcatcttatgtgatggggaaaacagtcgaaaccgaagacgaagactggaatttttaaccttgcgggcatgggaaataacgttacattttccatgcctttatttcaagcaataccgggttaaatcgcgcaaatattacaacatgtcctacactcaatacgagtgacattattcacctggattcctccaattcaggtggatttttgctggttgttccaaaaaatatctcttcctccccattcgcgttcagcccttatatcatgggaaatcacagccgatagcacctcgcaatattcatgccagaagcaaattcagggttgtctcagattctgagtatgttagggtagaaaaaggtaactatttctatcaggtaacatatcgacataagtaaataacaggaatcattctattgcatggcaattaaattagaagtgaagaatctgtataaaatatttggagagcatccgcagcgtgccttcaaatatattgaaaagggactatcgaaagagcaaatactggaaaaaacggggctatcgcttggcgttaaagacgccagtctggccattgaagaaggcgagatatttgtcatcatgggattatccggctcgggtaaatccacaatggtacgccttctcaatcgcctgattgaacccacccgcggacaggtactgattgacggcgttgatattgccaaaatatcagacgctgagcttcgcgaggtgcgcaggaaaaagattgcgatggtcttccagtcatttgcgctcatgccgcatatgaccgtgctggataatacggcattcggtatggaattagcgggcatcgcggcgcaagagcgtcgcgaaaaagcgctggacgccttgcgtcaggtggggcttgaaaattacgctcatgcctatccggatgaactttccggtgggatgcgtcagcgtgttggacttgcccgcgcgctggcaatcaaccctgatatcttattaatggacgaagcgttttccgccctcgatccattaattcgtaccgaaatgcaggatgaactggtgaaattacaggcgaaacatcagcgcaccattgtctttatttcccacgatcttgatgaggctatgcgtattggcgacaggattgccattatgcaaaatggcgaggtcgtacaggttggtacgccggatgagatcctgaataatccggcaaatgattatgtccgcacgttcttccgtggcgtggatattagtcaggtctttagcgccaaagatattgcccgtcgcagtccggtcggcttaattcgtaaaacgccaggtttcggtccccgttcggcactgaaattattacaggacgaagaccgtgaatatggttacgtcattgagcgtggcaataaattcgtgggcgtcgtgtccatcgactcattaaaagcggcattaagccaggcgcaagggattgaagcggcgcttatcgacgaccctttagttgttgatgcgcaaaccccactcagcgagttgctctctcacgtcggccaggcgccctgcgcggtgccggttgtcgatgaagaacaccagtatgttggcattatttcaaaacgtatgttgctacaggctttagatcgcgaggggggtaacaatggctgatcaaacgaatccgtgggataccgcacaggtggccgatactacgacgcaaacggctgatgcctggggaacaccggcaggcgtagccacggacggcggcagtaccgactggttgaacagcgcgcccgcgccagcccctgaacacttttctcttctggacccgttccataagacgctgatcccgctggatagctgggtcacagagggaatcgactgggtcgtcacccatttccgtcccctttttcaggggattcgtgtgccggtggattacatcctcaacggctttcagcaactgctgctgggaatgcccgcccctgtggcgattattctctttgcgctgattgcctggcaggtttccggcgtgggcatggggatcgcgacgctgatatcgctgatcgcgatcggcgcgatcggtgcctggtcgcaggcgatgattaccctggcgctggtgttgaccgccctgttgttctgcgtcgtgatcggattaccgatgggaatctggctggcgcgcagcccgcgtgcggccaaaatagttcgtccgctgctggatgcgatgcagaccacgcccgcgtttgtctatctggtgccgattgtcatgttattcggcatcggtaacgtgccgggcgtggtggtgacgattatttttgctctaccgccgattgtacgcctgacgatcctgggcattaaccaggtgcctgccgacttaattgaagcgtcgcgctcgttcggcgccagcccgcgccaaatgttgttcaaagtgcaactaccgctggcgatgcccaccattatggcaggcgttaatcagacgctgatgctggctctctcgatggtcgtcatcgcctcgatgattgcggtcggcggacttggccagatggtactacgcggcattggtcgtcttgatatggggctggcaaccgtcggcggcgtcggcattgtgattctcgccatcattctggaccgtctgacgcaggccgtcgggcgcgactcgcgtagccgcggtaaccgtcgctggtataccaccggtcctgttgggctaatcacccgccctttcgttaagtaactctcctgacgcccggtgacattgcgcttaccgggcttacaactccctaccataattaaaggaacaacgatgcgacataccgtgatatttgcctcagcgtttgccacccttgtcaccgccagcgctttcgctgccgacctgcctggcaaaggcattaccgtccaacctatccaaagcacgatttctgaagagaccttccagacgttactggtcagtcgggcgctggaaaagttgggttataccgtaaataagccgagtgaagtcgattacaacgtaggctatacctccatcgcctctggcgatgcgacgtttaccgccgtgaactggcagccgctgcatgatgatatgtatgccgcagcaggcggagacaacaagttttaccgcgagggcgtcttcgtctccggcgctgcgcagggctatctgatcgataaaaaaaccgccgagcagtacaacatcaccaatatcgctcagctaaaagatccgaaaatcgccaaaatcttcgataccaatggcgacggaaaagcggacatgatgggctgctcgccgggctggggctgcgaagccgtgatcaatcatcagaataaagcgtttgatctgcaaaaaaccgttgaggtcagccacggtaactatgcggcgatgatggctgataccattacccgttttaaagaaggcaagccggtgctgtattacacctggaccccgtactgggtgagcgacgtaatgaagccgggtaaagatgtcgtctggctacaggtgccgttctcctctctgccgggcgaacagaaaaatattgatactaaactgccgaacggcgcgaactatgggttcccggttaataccatgcatattgtcgccaataaggcatgggcggagaaaaacccggcggcggcgaaactgttcgccatcatgaagctgccgctggcggatatcaacgcgcagaacgccatgatgcatgccggtaaatcgtctgaagccgatgttcagggccacgtggacggctggatcaacgcccaccagcagcagtttgacggctgggtgaaagaagcgctggccgcgcagaaataagatcgttttttatgccggataaagcgcagttcatgcgccgctatccggcctattcaatctctcctcaaagcgcacgattcatcacgtcaccgttcccctttattcatcaacatccgctatgattgttttcccaggaaataattatctgaatcacgattaccataatgacgaaacccactcatgagcttagcccggcgctgatcgttttaatgtctgtggccacgggtctggcggtcgccagcaactactatgcccagccgctgcttgataccatcgcgcatcacttttcgctttccgccagctccgcagggtttatcgttaccgccgcgcagttgggctatgccgctggcctgttgtttctggtgccgctcggcgacatgtttgaacgccgaacgctgattgtctccatgacgttgctggcggctggcggaatgctgatcaccgccagcagtcagtcgcttagcatgatgatactcggaacggccttaaccggactgttctccgtggtggcgcagattctggttccgctggccgccacgcttgcgacgcccgccacccgcggtaaagtggtcggcaccattatgagcggcctgttgctggggatcctgctggcgcgaacggtcgccggactgctggcaaacctcggcggttggcgcaccgtattttgggtagcgtcggcgctgatggcgctgatggccgtcgcgttgtggcgcggactgccaaagctcaaatccgacacccatcttaactacccgcagctgttgggttctgtattcagcctgtttattcacgataagctgctgcgtacccgcgcgctgctgggctgtctgacctttgctaatttcagcatcctctggacgtcaatggcctttttgctcgccgcgccgccgtttagctattccgaggggatgattggcctgtttggcctggcgggggccgccggcgctttaggcgcgcgtccggctggcggatttgccgataaaggtaaatctcacctcaccaccacgttcggcttactgctgctgttactctcctggctggctatctggcttgggcatacctcggtactggcgctgattattggcattctggtactggacctcaccgttcagggggtacatatcaccaatcagacggtcatctatcgtttgcatccggatgcgcgtaaccggctcaccgccggctatatgaccagctactttatcggtggcgccgcggggtcgctgatttccgcctccgcctggcaacatgccggctgggccggcgtttgtctggcgggtgtcacggtagccttacttaatttactggtctggtggcgaggttttcaccgacaggaagccgtaaattaagcggatagtgagcgtttacctttgtttaagctccttagggtgttaaggagctccccagtctgttaaggttatgctattcatttatcatggttatttttataccggtgaagaataatataattctatggaaagccctgcatccccatctgctcccaggccaatagcgcccgttcaaggattcgaaggtcgttcaccgatagctatccgtgatattccggtggcttttgcatcgggttgtaaggccgtttacccggctttcgcccctcccgcttatcgttctctcctgattttttcatgcaggcactcacgcttttctcgtcattcctggatttgccgcaggcggcgctttaccgggcccaatgttcccgctggcgtctcagtctgcgtatcattggttgctttatagcctgaaagaatgattttgtattaataatacatttactttatttgtcactgtcgttactatatcggctgaaattaatgaggtcatgcccaaatggatagttcgtttacgcccattgaacaaatgctaaaatttcgcgccagccgtcacgaagactttccttatcaggaaattcttttgactcgtctttgtatgcacatgcaaggcaagctcctggaaaaccgcaataaaatgctgaaggctcaagggattaacgagacgttgtttatggcgttgattacgctggagtctcaggaaaaccacagtattcagccgtctgaattaagctgcgcgctgggttcatctcgcaccaatgcgacacgcattgcagatgagctggaaaaacgcggctggattgagcgtcgtgagagcgataacgaccgccgttgcctgcatctgcaattaacggagaaaggccaggcatttttgcaagaagtgcttccgcctcagcatcattgtctgcatcaactctggtcatcacttagcacagccgaaaaagatcaacttgagcacatcactcgtaaactcctgacgcgtcttgatcaaatggagcaggaaggcactgttcttgaggcgctgcgctaaagcgccgacccgctcaaaaatccagattaataacaggaaagcggacaggccggcacgcattactgctggcctttctgacaacaggtcggctcagccgatgtgaataataagatcgtggagaacaacatgagcgcaaatgcggagatccaaaccccgcagcaaccggctaagaagaaaggcaaacgcaaaacagcgctgctacttcttaccttgctctttgttattattgccgtggcatatggaatttattggtttttagtattgcgtcatattgaagagacagatgatgcttacgtggcagggaaccaggttcaaatcatggcgcaggtgtcaggcagcgtgacgaaagtctgggctgataacaccgactttgtaaaagagggcgatgttctggtcacgctcgatcagactgacgccaaacaagcgtttgaaagagccaaaacggcgctggcctccagcgtgcgccaaacgcaccagttgatgattaacagtaagcagttgcaggcgaatatcgacgtgcaaaaaaccgccctggcgcaagcgcagagcgaccttaaccgtcgtgtgccgctgggtaatgccaatcttattggccgggaagagctgcaacacgcccgcgatgccgtcgccagcgcgcaggcacagctggatgtcgccattcaacagtacaatgccaaccaggcaatgatactcaacagtaatctggaagatcagcctgcggttcaacaagcggcgaccgaagtgcgtaacgcctggctggcgctggagcgtactcgcatcgtcagcccaatgactggttatgtctcccgccgcgccgtccagcctggcgcgcaaatcagccccaccacgccgctgatggccgtggtgcctgcaaccgatctgtgggtggacgctaactttaaagaaacccaattagcgaatatgcgcattgggcagccagtgacggtgattactgatatttatggcgacgacgtaaaatacaccggtaaagtcgtcggtctggatatggggacaggcagcgccttctccctgctgcccgcgcaaaatgcgacgggtaactggattaaagtggttcaacgtctgccggtacgcgtcgaactggacgcccgccagttagaacaacatccgctgcgcattggtttatcgacgctggtcaccgtggataccgctaatcgcgacggtcaggtactggccagccaggtacgaacgacgccggttgccgaaagtaacgcacgcgaaattaatctcgcgccggtcaataaactgatcgacgacatcgtacaggctaacgcgggttaatcctgaggtgcgtgtgatgcaacagcaaaaaccgctggagggcgcgcagctcgtcatcatgacgatcgcgctgtcgctggcgacattcatgcaggtgctggactccaccattgccaacgtggcgattccgaccatcgccgggaacctgggttcttccctaagccaggggacatgggttatcacctctttcggggtggcgaacgctatctcgattcccttaaccggctggctggcgaaacgttttggcgaagtcaaactgttcatgtggtcgacggtcgcctttgccgcggcctcctgggcctgtggcgtatccagcagcctgaatatgcttatcttcttccgcgtggtgcagggcgtggtcgccgggccgctgattccgctctcgcaaagcctgttgctgaataactatccgcctgcaaagcgctccattgcgctggcgctctggtcaatgaccgtcattgtcgcgccgatttgcggcccgattctggggggctacatcagtgataattaccactggggatggattttcttcatcaacgtgccgattggcatcgccgtcgtcctgatgacgttacacacgctgcgcggacgtgaaacgcataccgaacggcgacgtattgacgccgtcgggctggcgttactggtgattggcatcggcagcctgcaaattatgctcgatcgcggtaaagagctggactggttctcctcacaggaaattatcatcctgaccgtggtcgccgtcatcgccatcagtttcctgatcgtctgggaactgaccgacgatcaccctatcgtcgatctttctctttttaaatcgcgtaacttcacgattggctgcttgtgcatcagccttgcctatatgctctatttcggcgccattgttctactgccgcagcttttgcaagaggtgtacggctataccgcaacgtgggcaggtctggcgtcggcgccagtcggcattattccggtaattttgtcgccgattatcggacgcttcgcgcataaactggatatgcgcaggctggtcacgttcagcttcattatgtacgccgtctgtttttactggcgcgcctggacgttcgaaccgggtatggatttcggcgcttccgcatggccgcagtttattcagggatttgccgtcgcctgcttctttatgccgctgaccaccattacgctctccgggttaccgccagaacggctggcggcggcatcaagcctgtcgaacttcacgcgaacgctggcgggctccatcggcacctcgattaccaccactatgtggaccgatcgtgagtcgctacaccatgctcagctcacggagtcggttacggcgtataatccaaacgctcaggctatgtacgataaactggaaggcttagggatgacgcaccaacaggcgtcaggctggatagcccagcaaatcacgaatcaggggctgattatttccgccaacgaaatcttctggatgtcggcggggatcttcctggtgctgctcggcctggtgtggttcgccaaaccgcccttcggtgcgggcggcggcggtggcggcgcgcactaactatctgataaaagggatctgcggatcccttttttagtaaaccaacaatcaaaagaaatatttgaatctcagacgcccgccgtaacgcgcatcttcactgttatcgccattattcggattggcctctacccatgaagcataggcaccgaggtagatgttaaagtttttcatatccatcacgttggggaataaatatgaggcatgaatagtgtgaatatcataattgccgggatcggtgatccaacaatcgtcctcacaaacggcatcgatattggtagcattgaaggcttcgattttgttatgcgcatagatataacccagttcaaatcgatgccacagcgcattcaccccagcggtaaaatctgtctcatcggtcgcatccatataggcggtattcaggttaatcactgcgccatcttccgggtcagttttttgaccattccaggtcatggtaaaaccatagcccgtacgatctgactgatcgatccacttcccattctcataatagccataggcgttgttaacgacgttactttccatcgctatcgccgttgaaaaacgcccgttttgccaggcgataaccggacggacgtaagccacgtttttatcgttggttaaatccattccgtggtactgcttctctgtatataacgtactgccattttccagcaatgtgttaacttcgaaataccagttgtcgatggttttgctcagcaggaagttacccccactgtcgctacgtccccgtccttctttcatcatatagatatagccgtaaccgtcactgtaaagatcgttcgctgtattccccgaatattcaataaacgtatcctgattcagcgggaacatatcgtaggcttcaaaacgaccaaccttaattttccagtcattctcacgaccaaagaagaaaacggcatcatcaaggttcatttttccggtcaggtccgccagaggctgtacagagaatccggcaaaattaccgttgtccagccgctggtagccatcaaagcccagcaacaagcgcccgttaatatcccagcgttcattggttcctgatgcccaatctttattcgctgacgttctcatcgaggtcaggctaccggaacggcttgccgcatccatattaaattcgacatcgccatagaacttaatatcgctgaatccggataaggtcagcttcggcggcgttttatctgctgcaatgggctcggcggactggacattcaccgtcggcgtagcggcgacctgctgctgtttcaacgagcgaatttgcgcctcggcatcggatgcccgtttttcagcattaacaacacgttgctccagttcagccagacgctgctcaatagtgatattattcgctgcccaaaggttatgagaaaagcaagcaccgatcatcagcgccaaatatttagccttcattttttatcccttaagtttgatgtataccagataagatttgctaaaaaccccatcgaccggctattagtagagtcttgttattacctggatatctggcgcattccattatgtttttctattaattatttatgatttttagtttatgtgatcaatacactctggcatcgtgagttatccgccttttctgtttaccagatcacattttattatttaacaggccaggcattacttaatttaaaatgtattcttgccgcaaatataataaatacaaattatattaagcaataaaaaaccccggtcataaaccggggttaatttaaatactggaaccgctcaccaataagactaaatatgcaattcctgcagtttttctttcggcagcgccagctctttattgctgttcacgcgcacatcacgctccagaatatgacgggcaatgtcctgcgcttcactgagcgagtgcatctgatacgtaccgcactggtaaacgttcagctccggaatctggttttgatcctgcactttcagcacatccgccatcgccgctttccacgcgtcggcaacacgctgctcgtccggcgtgccaatcaggctcatgtagaaaccggtacggcagcccatcggcgagatatcgataatctcaacgccgttaccgttgaggtggtcgcgcataaagccagcaaacagatgctcaagcgtatgaatccctttttccggcatcacttctttgttcggaatgcaaaaacgcagatcaaacacggtgattgcgtcgccatgcggggtgttcatcgtttttgcaacccggaccgccggcgcttgcatccgggtatgatcgactgcgaagctatctaataatggcatttagtcacctccgataattttttaaaaataaactgaactctttgttccggggcgagtctgagtatatgaaagacgcgcatttgttatcatcatccctgttttcagcgatgaaattttggccactccgtgagtggcctttttcttttgggtcaggcgtgttttgcaagccacgcggcaaacggctcggtatccgccgcctcaatctcctgctgacgacgtactgaagcgtcacgttcagcaataaactcttcttcctgtaaaatctccagcggctcttcgcgtaacagattacggtaagcctcaccgaacgctttcccggtgccgccaatgccttcatcaatcatagaccgtaagattcgggcggagaatgtcagttcaggattatcaaagcaggcgaccaactcgtcacacaccttttgatactcctctcccccgtggatactgtccagcgtttgcgccacgcgtttcagatcgcggaagagatctttccctactttgggcagcgggaactgcgcagtttcacagccaatgcctaacgtcaggcccggcttacgcccttccagaataacgcgattccagttagtacgcgtacataacagctcatcgctactcatttccggcgcatcggccaatacgcaccagaccataaacagatcgaggaagcgcacctgttgctcgtctacgccgatcggtgagaacgggttaatatcgagagaacgaacttcaatatactcaataccaccacgcagaagcgcgtcagaaggcgattcgccgctgcgcgtcacgcgcttgggacgaatgggcgcgtacagctcattttcaatttgcagaacgttgctgttaatctgtagccgcttaccgtctttttccacaccaatccgcgcgtactcctcggaaggggttttaatcgcccgcttcagacctgcaacgtattcatgcaaatcgttaaacgtaattccgagattgctttgcgacttattggtatagcccaaatcactcaaacgcagcgacgtcgcatacggcaggtagtacatgccgcagtccgttttttcaaacggtaatgtggttggcttcccttgcaggaaagaggaacaaatggccggagacgcgccaaacagataggggatgacccagccaaaacggtaatagttgcgaatcagacgaaaatagccggcagaaattttttcttttgccgcttcgccttccgtaacgccgcatttcgcctgccagaacgccatcggtaatgaaaaattgtaatgtacgccggagatggtttgcatcaaggcgccataacgatttttcagcccttcgcgatagagcgtcttaaagcgcccggtattggatgtgccgtactgcgccagctctatgtcctgcccttccgcaatatagcagggcatacttaatggccacatccgctcatcgcccagtttcctggccgtataccgatggagatcgcgcataaaggtgagcatatgctggatatcgccatcgactggcgtaataaactccagtagggcttccgcaaaatccgtggtaatccatttatgggtcagcgctgaacctaacgcttcaggatgacctgttgtcgccagcgtgccatcagcattgacacgcagcgtttcgcgctctaacccgcgctgtatcccctttaacgcctgaggatgtttttccagccaggccagagcctgtgatacgtccgggatcaaattgacctcccgcctgtccaaatcgttttaataagcataactgtaatggcggccatacatgccaaacctacaattattaccaccacatcatgccctgaaccgtcgccgctgcgagcgcaacatagcgcagcgccttaccaagacacaaaaaaaagatcgtccgcccccacgggatgcgcatccatcccgctaacaggcacaacaaatcaccgatgaccggcatccagcttaataatagtgtggctgcgccataacgctttagccagccagtcgctttttcctgccagcgcgacgttttgcgcagcggaaagaaacgcccaagaataacgttagttacccctccaaggctattacccattgttgctgttaagactaagacccagggatgactgacgccggagaccagcatagcaaccaaaaccacctcagaattaccgggtaacagcgtcgcgctgagaaaactactggcaaacagagacaggagcgacagtccgtcactcacaatagtcggacatccacggcatccattcccgccgcccgcgccgcctgtaaaccaaaatcggcatcttcaaataccacgcactgcgtcggcatgatgcccatccgctgggcgcacagtaggaaggtgtcaggcgcgggtttgtgatgctgtacgtgatctgccgccacaaccgcatcaaaataacgacgcagccccagatgcgctaacaaggcttccgcgatagcgctttcgctaccggtaccgaccgacatgggacgccgcccatgccacgctttgaccacctcaaccagcggcagcggttctacgcagtccagcaggatgctttttaccgcgtcggttttctcacgcgccagtgacaggggatcaagatcggcatggttaagctcaatgattgactgggcgataagccaggttggcgaaccgttaagcgcgaccattgcctgttcatcaaaacgaagaccatagcgccccaaaacctcacgccacgctttgcgatgcgtgggttcggtatccaggagagtaccgtccatatcaaaaatcaaaccagcataacgtgcgtacatcgtgttctcgcaaaccgaataaccagacagtactttatcgcaattggttgattttgtcgctaatagagatgaagaggtgtattcaggataaggggaaaagcgattgcagggcagtaacgtatccgggaggattattcgccttatgggccgttgctgacgcaacgttatccttcctggtgccagcggtgattataactatcttatctgcatcttcatcgctgaaagtacggagaatatggtgcatccgggaggattcgaacctccgaccgctcggttcgtagccgagtactctatccagctgagctacggatgcattggaaatgatgtttactacaagatttgatgtcgcatttactgccacactaaataagatggtgcatccgggaggattactcgccttacggctcgcccttcgggccgttgctaacgcaacgttatccttcctggtgccagcggtgattaccgctatcttatccgtatcttcatcactgaaagtacggagaatatggtgcatccgggaggattcgaacctccgaccgctcggttcgtagccgagtactctatccagctgagctacggatgcatcgggaaacttactttactgcagattttgataccgcgggaaagccgtatcaagtaagagatggtgcatccgggaggattcgaacctccgaccgctcggttcgtagccgagtactctatccagctgagctacggatgcaaatggcggtgaggcggggattcgaaccccggatgcagcttttgaccgcatactcccttagcaggggagcgccttcagcctctcggccacctcaccacacgcctcttacgagtgcttcgaagaacttgttctgctcatcgtcgctgcgtggcgcacatattactttctgggacttataagtcaaacaatttttccagagcttttatcgtttgcacacttcacgctcaattagtctgtaaaaaagccaaaaagagtgttttatcaacagataatttgatgacacgctggccgccaaaagcgcaccatatcaacagtgaggttgaaaaaagtcatgaaaggacaacgcgggcgagcgagaagagaggctgcgtctcacccgaaaagtgagacgcgaaaaccttagtaactggactgctgggatttttcagcctggatacgctggtagatctcttcacgatggacagaaacttctttcggggcgttcacgccaatacgcacctggttgcccttcacccctaaaactgtcacggtgacctcatcgccaatcatgagggtctcaccaactcgacgagtcagaatcagcattctttgctccttgaaagattaaaagagtcgggtctctctgtatcccggcattatccatcatataacgccaaaaagtaagcgatgacaaacaccttaggtgtaagcagtcatggcattacattctgttaaacctaagtttagccgatatacaaaacttcaacctgactttatcgttgtcgatagcgttgacgtaaacgccgcagcacgagctgcggcgccaacgaacgcttataattattgcaattttgcgctgacccagccttgtacactggctaacgctgcaggcagagctgccgcatccgtaccaccggcttgcgccatgtccggacgaccgccacccttaccgcccacctgctgagcgaccataccaatcaattcccctgctttaacccggtcggtcacatccttcgacacgcccgcaatcagagaaaccttaccttcaacaaccgttgccagtacgataacggtagaccccagttgatttttcagatcatcaaccatggttcgcagcattttcggctcaataccagcaagctcgctgaccaggagcttcacgccgttgagatcgaccgctttactggaaagatttgcactctcctgcgctgcggcctggtccttcaactgctgcaactctttttccagctgacgtgtacgttccagcacggcacgcactttgtcgcccagattctggctgtcgcccttcagcagatgcgcaatatcgtttaagcgatcgctttgcgcatgaacggtggccatagcgccttcaccggttaccgcctcaatacgacgaatgcccgctgcggtgccggactcagagataatacggaatagaccgatatcaccggtacgactggcgtgagtaccgccgcacagttcggtagaaaaatcgcccatgctcagaacgcgtacacgttcgtcgtatttctcgccaaacagcgccatggcccctttcgccttcgccgcgtcgagatccatgatgttcgtttcaatcggcaggttgcggcgaatttgcgcattcaccaaatcttcaacctcacgaatctccgacggcttcatcgcttcattgtgcgagaagtcgaagcgcagcactttatcgctaaccagcgaacctttctgcgcaacgtgtgtcccaagcacctggcgcaacgccgcgtgcatcaggtgcgtggcggagtggttcagacggatacgtgcgcggcgcgcttcatctacgtcagcctgtaccgcatcgcccactttcagagcgcccgcagacaatttgccgaggtgaccaatcgcctgaccatatttttgcgtgtcgtccacagcgaaagtaaatccagcgcctttcagctcgcctttatcgccaacctgaccgcctgattccgcatagaatggggtctgatccagcacgacaacagcttcctgtcccgcgttaatcgcttcaaccgctttaccatcgacaaacagcgcagtcactttgccgttcagttccagatggtcataacctttaaattcagaagcgctatcaacgcggatcatcgcgttgtagtccgcgccaaaaccgctagcttcgcgcgcgcgacggcgttgctcttccatggcggcttcaaaaccggcttcgtcgactttgatgttgcgctcacggcagacgtccgccgttagatcgaccgggaaaccataagtatcatacagacggaaagcggtttcgccgtccagggtgtcgccctgcaatttcgccagttcttcatccagcagcgccagaccgcgctccagcgtacgagcgaactgctcttcttccgttttcagaacctgctcgacctgcgcctgctgacgtttcaactcttcgcctgcggagcccattacctcaatcagcggcccaaccagcttgtagaagaaggtctctttcgcgcccagcatgttgccgtgacgaaccgcgcgacgaataatgcgacgcagcacataaccacggttttcattcgacggcagcacgccatcggcaaccaggaatgcgcaagaacggatgtggtcggcgataacgcgcagcgatttattacccagatcggtagcgccggtgactttcgctaccgcttcaatcaacgtgcggaacaggtcgatgtcatagttagagttaacgtgctgcagtaccgcggcaatacgctccagccccataccggtatctacagacggtttcggcaatggttccatcgtcccttcagcctgacggttgaactgcataaagacgatgttccagatctcaatatagcgatcgccgtcttcttccgggcttcccggagggccgccccagatgtggtcgccatgatcgtagaagatttcggtgcacggaccgcagggaccggtatcgcccatctgccagaagttatccgatgcgtatggcgcgcctttattgtcgccaatacggataatacgctcgcgcgggatgccgacttctttttcccagatctcataggcttcgtcgtcggtttcatagacggtgacccataaacgctcttttggcagagcaaaccagttttcaccggtcagtaattcccatgcgaactgaatggcgtcgtgtttgaagtaatcgccgaagctgaagttgcccagcatttcgaagaaagtatggtgacgtgcagtgtatccgacgttttccagatcgttgtgtttcccccccgcgcgtacgcaacgctgggaagtggttgcacgggaataattacgtttatcgagcccaaggaaaacatccttgaactggttcatcccggcattggtaaacaacagagtggggtcattgttaggcaccagggaactgctggcaactacctgatgccctttactatggaaaaagtcgagaaacgcctgacggatctcagcggtgctcttgctcataattatcctgaaatcaagctacacttcatccttcaggccgcctctgcgttagctgcgagtttcccggtcacgcgttcccgaggctcacttgccgctttgatgcggcttgaatgattttgtgtatttaaggaatattcgtcgcagacgctgttcgccgttaagcaacccgcgtccagacggaaaaagtgggaataagataagttttctttaccgggaagtaaaatcccgtatgcgctcaatctgcaaaatttcgccatatttgctggatatcgtccatcagatacccgcgatagagcaaaaagcgctgtaccttaaccttttctgaaaagtttgaagggagcggctcgccatatttgcgaacggcctgttcacgtgccatttcactccagtcaatttcacattctcgcatcgctttttcagtcgattcacgggaaatgcctttctgattcaactcctggcgaatacgcgccgggccatagcctttgcggctacgactggcgataaagcgcatcacgaagcgctcgtcatcaagatagtgatgttcgtggcaccaggcgatcacgcgttcataatcgtctgccgtcgcatcaatctcttccggcccatttttgcccatcaccggcgcggagagtttacgccgtaattcctgctcgctgtgatcgcggacagcaagaatacgtaccgcacgatcaaggagacgagcataagcgggacggcgcgatgtgggttcactcataaaaaaccttaacagggagaaatgccaaaagggccgcataaatgcagcccttgatggtaatttaacgttttgctgaatggcggtttcgttttgcccgacccaccatcacctgatgattaaaaatcttcgttggtttctgcaacgccttcgctatcgtcaacggcgaaatcgggcgtggcattctgattactcaacagtaattcacgaacccttttctcgatctctttcgctgtcgccgggttctctttcagccaggtagtcgcgttcgctttaccctggccaatcttctcgccgttgtagctgtaccatgcgcccgctttctcgatcagcttctctttcacgcccaggtcaaccagttcgccatagaagttgatgccttcaccgtagaggatctggaactcggcctgcttaaacggcgcggcgattttgtttttcaccactttcacacgcgtttcgctacccacgacattatcgccctctttcaccgcgccaatacgacggatatcaagacgaacagaggcgtagaatttcagcgcgttaccgccggtggtggtttccgggttaccgaacatcacgccaatcttcatacggatctggttgatgaaaatcaacagcgtgttggactgtttcaggttccccgccagcttacgcatcgcctggctcatcatacgcgccgcgaggcccatgtgagagtcgccaatttcaccttcgatttccgctttcggcgttagcgccgctacggagtcgaccacaatgacgtccaccgcgcctgaacgcgccagcgcgtcacagatttccagcgcctgctcgccggtatccggctgagagcagagcaggttatcgatatcgacgcccagcttgcgtgcgtaaacagggtcaagcgcgtgttccgcatcgataaacgcacaggttttaccttcacgctgcgcagcggcaatcacctgcagcgtcagggtcgttttaccggaagattccggcccgtaaatttcgacgatacgccccatcggcagaccgcccgcaccgagtgcgatgtccagtgaaagcgaaccggtggagatagtttccacatccatagaacggtcttcacccagacgcatgatggagcctttaccaaattgcttttcaatttggcccagtgctgccgccaacgctttctgtttgttttcgtcgatagccattattactcctgtcatgcaacttggtattgaaccggatagtgaattcgtactgttgaagcaattatactgtatgctcatacagtatcaagtgttttgtagaaattgttgccacagggtttgtagcgcgtacgtcgtcgcctgtcgacgcaccgattcacggtcgccgctgaagcattcccgacgcgtaatcccttctccgctgacgctggcgaaagcaaaccacaccgtaccaaccggcttttcttcactgccgccatccggcccggcaattccgctaatagcgacagcaaaatcggcgcgagcggccttcagcgccccgatcgccatttcgaccactacgggttcgctgaccgcgccatgctgcgccagagtctcttcacgcacgccaatcatctgcgctttggcttcattactataggtgacaaagccgcgttcaaaccaggcggagcttccggcgatgtcggtaatggctttcgccagccagccgccggtacaggactctgctgtcgttacggtcgccccgcgcgcttttaacgccagcccgacctgttcgctaagccgcatcagttcactgtcagtcatcatgacctctgtcagttagaaatcctgccgcacaagatagcactttctcaccagagatggggacgagcagtcgattttacgagtcggattccgaaaaaatgccagcaggttatttatgcagaatgaaatgaggtagcacatgactaaatagcagtaccatgtcgctaaatttacacgcacggagagaaagcaaggatgtcactcaaaaaaacggaaagcacacagcacaaactgaaacaaacctgtcaactacggctgtggttaattgtgggtggagtatgttcattaggaatgggagtactgaatatattgtcgtcaggctattttgaaccgtatgatggcggtcaaattatcttaggcctgggatgtctgggatatagtctggcactatcaaagaagatatcccacttgcaggcagagaatcagcccaaaaagccataataatagcggagggggtgctcccctccctaagcgtaaattagcgcacccgcgccagcgctaccgcctggcccagttgccaaaccgccatcgcataatgcgtgctgtggttatatcgggtaatagtgtagaagttcggcaggccgtaccagtactggtagcccgtaccgatatccaaacgaagcaggctggcttcctgatgattgcccaacgattgctgcggcgttaagcctgcggcggcaagctgagagaggctgtattttgttttgaaaccattcgccagtcccggcgcctgaccattcgctggcaccgcaatcgtatcgcctttcacccaaccatgcgccttgaagtagttcgccacactgccgatggcatctaccggatcccacaagttaatgtgcccatcgccattgaaatcgaccgcatattctttataggaagatggcataaactggccgtagcccatcgcgcccgcaaaggaacctttcagattgagcggatcgtcttgctcatcgcgcgccatgagcaggaaggtttccagctcgccggagaaatattccgcccggcgcggatagttaaatgacagcgtcgccagcgcgtccagaatccgcgttttccccatgatacgtccccagcgggtttccacgccgataatccccacgatgatttccggcggtacgccgtatacctgccaggcgcggttcagcgcgtcttcatactgattccagaacgcgacgccgttttgcacgttatccggcgtaataaattgtttgcggtagcgcaaccaggcgccatttggtccggcgggcggctgagtggtcggcgcttgtctgtccatcagacgcaggacgtaatccagtcttttagactgcgagaggatctcctgcagctgctgacggtcgaaaccgtgtttattgaccattttatcaatgaactgctgcgcattagggttgttggcgaagtcgccgcccatttgcatgacgttatgctgcggctcaagcagaaagccgccggaaggcgtgcccgtcgtcgcttgagtctcggaagattttggcgtgctgctacaggcagcaagcaatacgcaaagtggaagtaacgctacataacgacgcttgaacatgagacatccattaaacaaattcagccagggagaagtatggtaaagcatcccccgccacacaaggaagcggcacaagagaataaatcacctttctcctcttttcagtttgtatccgctcccccactcccgcaatctttcaacttaaaatatttttcttttattttgcgatcacaataacacttttgaatctttcaacatgattacaatgaacaggaaattagcaagaaaactgaaaaccctacaggagagaacaatgatcgaaaccattacacatggtgcggagtggttcatcgggttattccagaaaggcggagaggtgtttaccggtatggtgacaggtattcttccgctactgataagcctgctggttatcatgaatgcgctcatcaattttatcggccagcagcgtattgagcgttttgcccaacgctgcgccggaaatccgctatcccgctacctgcttttaccgtttatcggaacgtttgttttttgtaatccgatgaccctgagtctgggacgctttatgccggagaagtacaagccgagctattacgcggcggcctcctatagctgtcactccatgaacggtctgtttccgcatatcaatcccggcgaactgtttgtttatctggggatcgccagcggactcaccacgttagggcttcctctcggcccgctcgcggtgagctatctgctggtaggtctggtgacgaacttcttccgcggttgggtcaccgatctcaccaccgctatttttgagaaaaaaatggggattcaacttgagcagaaagttcatctgacaggagcggtatcatgacacgggttcgtattgagaaaggcgccggcggctggggcggcccgcttgaactggacgttacgccaggcaaaaagatcgtctatatcacagccggtacgcgcccggcgatcgtcgacaaactggcgcaactaacaggctggcaagcggtggacggctttaaagaaggcgaaccgccggaagcggagatcggcgcggccattatcgactgtggcggtacgctgcgctgcggtatctatccgaaacgccggattccaaccattaatattcactcgacgggtaagtccggcccactggcgcagtatattgttgaggatatttatgtctccggcgtaaaagaagaaaacattactcttgtcggcgaaacgcctgccagtcctcagcctgccaaaacgacattaggacgtgactacgacaccagcaaaaaaatcaccgagcagagcgacgggctgctggcaaaagtcggtatgggaatgggctccgccgtggcggtactgttccagtccggtcgcgacaccattgatacggtcctgaaaacaatcctgccgtttatggcgttcgtttcggcgctgatcggcatcattatggcctcaggtcttggcgactggatcgcccacggcctggcgccattagccagccatccactggggctggtgacgctggcattgatctgctctttcccgctgctgtcgccctttctcggccctggcgcggttatcgctcaggtcattggcgtcctgatcggcgttcagataggcctgggcaatatccccccgcatctggcgcttcccgccctgttcgcgattaacgcgcaggcggcctgcgactttatcccggtcggcctgtcactggcggaagcgaaacaagacaccgttcgcgtcggcgtaccttctgtgctggtcggacgcttcctgactggcgcgcccacggtacttatcgcctggtttgtttccggctttatctatcaataagaggttcagacatgagcgtgatttatcaaaccaccatcacccgtatcggccagagcgcgaaggaggcgctcggcgaacagatgctgattacgtttcgggaaggcgcgccggcggatatcgaagaattttgcttcatccattgtcatggcgaactgaccggcgcgctgcagcctggcgcgcggtgtgaattgggtcaacattgctatccggtcacggcggtcggcagcgtagccgagcaaaacctgcgtgaactggggcatatcactttgcgcttcgatggtctgcgcgaagcagaatttcccggcaccgtacacgttgcggggcctgtaccggacgatatcgcgccgggctgtattttgacgtttgtcgcttaaggagaaaaaacatgaatcaagttgccgttgtcattggcggaggccagaccctgggggcattcctttgccgtgggcttgcagaagaaggataccgcgtggcggtcgttgatattcaaagcgataaagccgcgaatgtcgcccaggaaattaacgccgattttggcgaaggtatggcgtacggttttggcgccgacgccaccagcgagcagagcgtgctggcgctttcccgcggcgtagacgagattttcgggcgcgtcgatctgctggtttacagcgcgggtatcgccaaagcggcgtttatcagcgatttccagttgggcgattttgaccgctcgctacaggtgaatctggtgggctatttcctctgcgcccgtgagttttcccgcctgatgatccgcgacggcattcaggggcgcattattcagattaactctaaatccggcaaagtgggcagtaaacacaactccggctacagcgcggcgaaattcggcggcgtggggttaacccagtctctggcgctggatctggcggaatacggcattaccgtacactcgttgatgctcggcaacctgttgaaatcgccgatgttccagtcactgctgccgcaatacgccactaaactgggcattaagcccgacgaggtggaacagtattacattgataaagtaccgctcaaacgcgggtgtgattatcaggatgtgctgaacatgctgctattttatgccagcccgaaagcgtcttattgcaccgggcagtcgatcaacgtaaccggcggtcaagtgatgttctgaccgtgaattgccggatggcgccgtaagccggataagacggttacgccgccatccggcaaaacaacaggagcacattatggtttccactctgattaccgtcgccgttatcgcctggtgtgcgcaactggcgctgggcggctggcagatttcccgctttaatcgggccttcgataaacttagccaacaggggcgggtcggcgtcgggcgctccggcgggcgttttaagccccgggtggtggttgccgtggcgctggacgaacagcagcgggtgacggacactttattgatgaaaggccttacggtattcgccagaccggttaaaattgccgcaatgcaaggaaaacatttgcatgaattacagcctgatgtgatctttccccatgattcgctcgcgcagaatgcactatcattggcgcttaaactgaaacatgggtaatttcgttgtgaatgcgtatagcttgcgaaattatcattttgcaaccaataccctaaataattcgagttgcaggaaggcggcaacgcagtgaatcccaggagcgtacatcagtacgtgaccggggtgagcgaggaaagccaacgcacatgcagcgtgaagtatgacgggtaaatacataagtcagggtaatcacgcctatgaaacctcgtcagcgtcaggccgcgattctggagcacctgcaaaaacagggaaaatgctcggttgaagaactggcccagtactttgacacgacaggcaccactatccgtaaagatctggtcattctggaaaatgccggaaccgtcatccgcacctatggcggcgtggtgttgaataaagaagagtccgatccgcctattgatcacaaaacgcttatcaacacccacaaaaaagcgctgatagccgcagccgctgtgaaatatatccatgatggcgattccattattctggacgccggaagtaccgtgttacagatggtgccgttgctttcgcgttttagcaacatcacggtgatgaccaacagcctccatattgtcaacgcgctatcggaactggacaacgaacaaactatcctgatgcccggcggcaccttccgtaaaaaatcggcgtcgtttcacggtcaactggcggaaaacgcctttgagcaattcagctttgataaacttttcatgggaactgacggtattgacctgaacgtcggtgtgaccacgttcaatgaggtttacaccgtcagtaacgcaatgtgcaatgcagcacgcgaggtgattctgatggcggactcctcaaaatttggtcgtaaaagccccaatgtggtgtgcagtctggaaaccgtcgacaaactgatcacggacgcgggtatcgatccggcatttcgtcaggcgctggaagcaaaagggattgaagtaatcataaccggagaaagcaatgagtgatgcactactaaacgcgggccgtcagaccttaatgctggagctacaagaagccagccgtctgccggagcgtctgggcgatgattttgtccgcgccgccaatatcattattcactgtgaaggcaaagtgatcgtttccggtattggtaaatcaggtcatattggtaaaaaaatcgccgcgacgcttgccagtaccggtactcccgctttttttgttcatccggcggaagcactgcatggcgatctggggatgattgaaagccgcgatgtgatgttatttatctcctattccggcggcgcaaaagaactcgacctcatcatcccgcgtctggaagataaatccgtcgcgctgctggcgatgaccggtaaacctctctctccgctggggcgagcggcaaaagccgttctggatatttccgtcgagcgtgaagcctgtccgatgcatctggcgccgacatccagtaccgtcaatacgctgatgatgggcgatgcgctggcgatggcggtcatgcaggcgcgcggttttaacgaagaagatttcgcccgttcgcatccggctggcgcactgggcgcgcgtttgctcaataatgtgcatcacctgatgcgccagggcgatgcaataccgcaggtaatgctcgccaccagcgtgatggatgccatgctggaacttagccgtaccgggctggggctggtggcggtttgcgatgagcaacatgttgtgaaaggcgtctttaccgacggcgacctgcgtcgctggctggtgggcggcggcgcgctcaccacgccggtaagcgaagccatgacgcccaacggtattacgctccaggcgcaaagccgcgccattgacgccaaagagctcctgatgaaacgcaaaattaccgccgcgccggtggtcgatgaaaacggcaaactcaccggcgccattaacctgcaggatttctaccaggcggggattatctaatccttcagtcccagacgcttcgccagccgatgcaggttggcgacgtcggtttccagcgcccgcgcactggccgcccagttgtgattattttgcgccagcgcctggcgaatcatctctcgctggaagttctccgtcgattcgcgcaaattgcggcaggcaggcagcgccagaaagctttccgcagacggcgcgggtaaaacgtcctctgacaaggcaaaatgctgctcctccagtaccacctcatcccctgcccgggtcgctctcgccagtacaaccgcacggtgaatggcatgttccagctcccggacgttgcccggccagccatagttgagcaaatggcggcgcgcgccgggactcagtaccacgcgggacagccccagccgcagtcggcactgctcgcaaaaatagcccgccagcaacaccacatcatcgccgcgctcgcgcagcggcggcacaaagagcgggaaaacgctcaggcgatggaacaggtcggcgcgaaaacgccccgccagcacctcttcacgcaggtcacggttggtcgccgccaacacccgcacatccacgcgcaggctacgatcgtcgccgacgcgctgaatatcgccatactgcaacacgcgaagtagcttggcctgtagcgccagcgacagttcgccaatctcatccagaaacagcgtgccgttatccgccatttcaaacttaccgctacgattactgatagccccggtaaaagccccttttacatgaccaaacaactcgctctccgccacgctttccggcagcgcggcacagttgagatagaccagcggattgaccgctctgggggagccctggtgaatggctttcgccaccagctctttaccagtccccgtttcaccgccgatcagcacgttaagatcggagcccgccacaatctcgatctcttttttcaactgcgtcatcgccggcgacaggccgatcatgtgcgtctcttttatcggttcaaacacgcctgacgaccccggcagcatgttctggctttccagttgttcaattaacagcgcattgctcaatgccccggcggccagcgcggcgacaagccgcagctcttcatcgctaaatacctcgaactgctccggcgtcatagcatcaagggtcagcgcaccgatgaggttctgtccggcaaacagcggcagaccaacacaggcgtggactttcaggctttcctgtccgggaattaacccgtcatacggatcgggtaaatcgctatcagccggaaaacgcaccacgtcccccgcgcgagcgatggcttccaggcgcggatgcccttccagggtaaaacgtctgccgagaacgtcctgcgccaggccatcaatcgccagtggaataaattgtcgtgattcataacgcaacagcgccgaggcgtcgcacgccagaacctgacgcagcgtagtaatcagccgctgaaaacgatcctgatgcccaatgccgcgttgtaactcaatggcgatgcccgccaatacctccacggaaaaactcatggttacctcattgtcattttgacaacctatagtgtcatattgacagcatcatttatagtctttttgactatatcaaaaatacaaacttattataaattcatataaatcaataagatgtaaaattggcacactacctgcaataagcaaaacaactttttgtaaacgttgaatgaattgaggtggttatgtctattctggttaaaaataatattcattgggttggccagcgcgactgggaagtacgtgattttcacggcactgaatacaaaacgctgcgcggcagcagctataacagctatctcattcgtgaagaaaagaatgtgctgatcgataccgtcgatcataagtttagccgtgagtttgtgcaaaatctgcgcagtgaaatcgacctcgcggatatcgactacatcatcattaaccatgccgaagaagaccatgcaggcgcgctgaccgaactgatggcgcagatcccggacacgcctatctactgtaccgccaacgccattgactctatcaacggccatcaccatcacccggaatggaattttaaggtggtgaaaaccggcgatacgctggatatcggcaacggcaagcagttgatcttcgtggaaacgccgatgctgcactggccggacagcatgatgacctatatgaccggcgacgcggtgttattcagcaacgacgcctttggtcagcactactgcgacgagcgcctgttcaatgatgaagtggaccaaaccgaactgtttgaacaatgccagcgctactacgccaatatcctgacgccgttcagccgtctggtaacgccaaaaattaccgaaatcctcggcttcaacctgccggtggatatgattgccacctcacacggcgtggtatggcgcgacaacccaacgcaaatcgtggaactgtatctgaaatgggcggcagattatcaggaagatcgtatcactattttctacgataccatgtcgaacaatactcgcatgatggcggatgccatcgcgcagggtatcaatgaagtggacccgaacgtggcggtcaaaatctttaacgtcgcccgcagcgataaaaatgaaatactgaccaatgtcttccgttcgaaaggcgtgctggtcggcacttctaccatgaacaacgtgatgatgccgaaaatcgctggtctggtggaagagatgaccggcctgcgctttcgcaacaaacgcgccagcgccttcggttctcatggctggagcggcggcgcggtggatcgactgtccacgcgcttacaggatgccggttttgaaatgtccctgagtctgaaagcgaaatggcgtccggatctggatgcgctggagttgtgccgtcagcacggtcgcgacatcgcgcgtcagtgggcgcttgctccgctgccggaaaccacacagaaaaccgcgccagtcgaagaaaccacaacctgcgccgccgcagacttcggccccaaaatgcaatgcagcgtatgccagtggatttacgaccctgcgctgggcgagccgttgcaggatgtcgcgccgggtacgccgtggaacgacgtgccggataacttcctgtgcccggaatgttcattaggtaaagacgtgttcgacgtactggcgacggaggcaaaatgagtcggggaatcatcattattgggtcgggcttcgccgcccgccagctcgtcaaaaatatccgtaaacaagatgcgcatgtgccgttaaccctgattgcggcggacagcatggatgagtacaacaagcccgatctcagccacgttatcagccagtcgcagcgcgccgatgatctcacccgccagttagcgggggaatttgctgaacagtttaatctgcgactgttcccgcatacctgggttgctgacattgatgccgatgcccatgtggtgaaaagtcaggataagcagtggcagtacgacaagctggtactggcgaccggggcggcagcctttgtgccgccgattgcaggacgtgagttaatgcttactttgaatagccagcaggagtaccgcgcctgtgagacacaactgcgcgacgcgcagcgagtgctgattgtcggcggcggtctcattggcagtgaattagcgatggatttctgccgcgccgggaaaacggtaacgctgatggataacgccgccagccttctcgcctcactgatgccaccagaagtgagcagtcgcttacagcatcacctgaccgatatgggggtgcatctgctgctgaaatcgcagttgcaaaaactggagaaaaccgaagccggtatccgcgctacgctggtaagccagcatagtattgaggtcgatgcggtgattgccgccaccggcttacgcccggaaaccgctctggcgcgccgcgccggggtagccgtcaaccgcggcgtctgcgtggatagctatctacagaccagtcacccggatatttatgcgatcggcgactgcgcggagatcaacggtcaggtgctgcccttcctgcaaccgatccagttaagcgcgatgtacctggcgaaaaatctgcttggcggcaacgcgccgctgaagctaccggcgatgctggtcaaagtcaaaacgccggaactgccgctgcatctggcgggagaaactcagcgcagcgatttgagctggcagattaccgcagaatctgacggtatgattgccaaaggcatgagcggagaaggccaactacgcgcctttgtggtgagtgaagaccgcatgaaagaggcctttgcactgctgaaaacgttgtccgtataagcctgtgatgccggatggcgccgcttcgcgtcttatccggcctacgagtgagcatctgtttgcaggccagataaggcgcagccgccatccggtgccctacacttcccttaacgctcgcgctgcggcaatcacgccctgtccaaacgacagtccgccgtcgcccgccggtaaccgctgcggaaataacaatttaaaatcagaaagataaaaggcaagacgcgcgcgaagtaagcggttgtgtatcaccccgccgctgaagaccagagtggttatcccccgcgccgtagcctgctggcgcattagcgtggcaaacccgcacgccagcgcatcatgaaaagcccaggcgcgttgcgcgggcgtggcctgccagttcaaccattgccgccagaaaacggcgacgtccagttgagcgccgttaagcggcatcgttaccggatgctcaacgttagcgcattgagaggccagcgcctccagcgcgcaggcggcctcgccctcatagctaagcgatgctggcgtgcagcgaagcgcggcagccaccgcgtcgaacaacctcccgcaggaagaggccaacggggcattgacgccgcgctcaatggcacgcgccaggacattccagttttgctgttgcagccccgcagtctccgggtaatcctgccagtccggcacaaagcgcaggcactgcgccaacagattacgccacggatgtttggcagccagatcgcctcccggcagcgccacggcgggtaaaccgcctaaatgttcgcactcgcgataattgacccgcaaacattctccgccccatagcgcgccattctcacccatgccgataccgtctaccgtcagggcaatcacctctccaccgtccagcggccaaccatgctcggccaggcaagccgccgcatgggcatgatggtgtaacaccgtctctgtcggcagacgcatctcactggcccactgactggaaacatagcccggatgcgcatcacagacgatacgctctggcgtaaaatcgtagattgactggatcagacgcaatgcctcgcgccactgcgcctggataccgtcatcgctgagatcgcctaaatgctggctgacaaccgcctgttcgccgcgtaccagacagaacgtgtttttcagatccgcgcccagacaaagtatcggcggcacatcgcgaaatccgggcggcaacgcaatcgcgtccggcacgtatccccgcgaacgacgcagcatttcgccgctgtcgcgcacgacagagtcgtccatgcgctgtacaatgtcgcgattatgcaacagaaaaccatcggcaatatcgtgtaaatcgtccagcgcctgttcgttggtgatggcgggcggtttgccgctcaggttgccggatgtcatcaccagcgggtaattgagcgcctgcaacaagaggtgttgcaatgggttggctggcagcatcacgcccacttccgtaagtcctggcgcgatgccctcactcagcgaaggtacatactgcttatccaccagtacaatcggggccgctggcgtggtcagcagcgaacgcgccgcgctcggcagcgtttgcgccgtgggcaacatcaccgccaatggtttcgccgggcgatgtttacgcgcccgcagcatcgccactgcgttatcgttgcgcgcatcgcaggccagatgaaacccccccagccctttaacggcaataatgcctccggcgttcagttgggcgaccgccgcctgcaaagccgcctctttttccgctcgctcatgttggctccgccactcaagatgcggcccgcatgacggacaggcaacgggctgggcatgaaaacggcgatcgtacggatcgcggtattcgctgtcgcattccggacacaagggaaacgccgccatcaccgtaaatggccggtcatagggcatagcgcgaataatggtgaagcgtggtccgcagtgggtgcaattgatgaaaggataacggtagcgccgctcgcctggggtattcatctcggcaagacatgccgggcaggtcgccgcatccggcacgatttgcgtgttcatcgaaccgcctgcgctctgacgaatggtgaaatccgtcggcgcgcgctcccataccaacgacgcgtgttcaacgctgtcaatgcgcgccagcggcgggcaatcctgatagagcgcggcaataaattgcgacggctcttccagcagccgaacgacgacgccgtcgccgtcattacacacgtcgccgtgtaatcgcaactgctgcgccagctgccagacaaaaggacgaaaaccgacgccctgtactttgccccgaatgcgtagctgtacgccggaaggtgtgtctatcgccatcttattttcccgccatcatcgaacccggatgcctgatggcgcgacgcttatcaggcctacaaccgcacggaccgtagaccggataaggcattgatgccgccatccggcaatgctttgtggcgtattctacgcgcaatcgcagaaatcagaaaagcagcgatgccgttgaatccagcgccgcgcgacggcgtttttccgcgctcagctgttcaagcttattgcggtccacgcagattagggcgtgcgttgggcaagcggccatacaggccggaccggcttcacggtggtgacacagatcgcacttgttggcttcggctttttcggcacgcacgttcagccccgcgccgctattgcgaaccaccggacgtaccaccacttccatggcgccgtaaggacatgccactacgcaagttttacagccaatgcagcgttcctgcatcacatgaacaaagcctttgtcacggctgatggcgccattcgggcaaacgttggcgcacggcgcgtcttcacactggcgacacagcgttgccgtggaaacgttcacgcctttgatgacatggatacgaggtaaaaaggtttcaggggtcagcgatgcgcaatcctgattttcctgatgggatacgacgcaagccacttcacaggtacggcaaccaatgcacttactcgcgtctgcaatgatgaaacggttcatcaaattctccagcaataacagatgatgtgccgatatatacacgaatcgtgccaatttttatttcattgttatttaagaatattatttctattttcgtgagcatttacgtgtcatcgtcacaagtgtcgatgacacgtaatgtcgccagtggtggtcaagatttgcagtgatagccagccaactctgcaccgcaactggcatcaatcctgattaacgcctggcaatacgttaccgcgtattaaacagcgctgcgtaagggaaagatcgtccgtttgcggattccttccggcaataggtttgataattaatttacggccaggatagtgattaaaacgggtcagcgccggataacccaaccggccaaaccagccgtgtacgcgctgccagcgggcgtccttcacctgatataaattggttatccagtagcctgagtcaaattgcatatccaacagttgcgtgcgcccattgccctgtaaatcaagcaaatcatcaacgccagtatcggtcgcggtataaaacccccacggttcaaagacgcaggggcggccattcttgagaaatggtgaaaatgatgtattgcgcgctcggcgccaggcccaacccaggattgcccaaccagataaccagatcctgaatgccgttacgatcgaggtcagcgcgataaaattgcgcattacccgccaaattaatcagccttcccaccgggacaacccacgaattaccggctctgtcttttccgctaatccgccattcgttatcttttttcggctccggcagtagcgtcacgccactgactccgacctggcgaaaatgccaggtctggtcgggcgatacagaataaggcagggtcaacagcggcttcagcgcacgcttttgcgcatattcaccgtcgctcatcggcaggtaaccgacaacaccggtggccagtgcgcgtgcggcgaggcagagaaatagcagtccgctccatacgataatcttcacgtccttcttacaacctttgccgtgtaacacaaattctccctaaatatgtgcgcattttacgcctccggcgcttccagcgcggcaaatccgccgtttccctgccagccttccaggcgctgatagacgatatttaccgcgtccttaatcggttgagtcatcggataataaaacccgacgatatccggctggataccaacaaaaatcacctcgccgacatcctctttcagctgatcgataaggtagttgagcggcatattgtgggtggtcatcataaacatttcggcgatatcatccggatcgatgatgcggatctcgcccggattaagtcccatgtcggtggcgtcgacaatcaacagacgctgcgggcgcagttcgcgaatcgccacaatgtcgttttccggcgcgctgccgccatcaatcaccacccaattccccttcggctgcgccgcgcacatttccgccagtaatgggcctgcgccgtcgtcgcccatcatgctgttgccgacacagagtaaaacgtcagtcacgaagcctcctcaccatcaggtagatggcgctttcctgatgaatgtcatgcagcatactgagcatcagtttgctccattcttgctgctgcggggtctgcgcggcgcgcgcctcatcaaacgcgcgcgccagcatttgcacatggttgaaatcgataacgatctcgccatacttcggcacgccttccattttacgccgggcatcgctaccggcttccagggtggcgatccacgccagatactcatcccatgggcaggtgagcgcggcctccagacaatcgataacccccaagtggtgaccaatcgccaggctgtaatagacaacctgctgcgcctcggcaggcgtcgcatcgttctcatcaataaacttacggctcagttgactgaacaccacctgttcgctcatcggatacgcgcctcttcaacaacatgattgagatgggtgacaatttcggttaaacgcggatcgttttccgcttccagccaacgcgccacttgctgctcgccctgccccaactgtgtcaggtaatcatcggcgatctgacgaccatagcgataacccgccagccggcgcgccgcgcgatccaccttcacgcgcagcggctgcaccatatccggatgcaggatctctgcgggctgatcgtccagctcacccggcgcgcgggcgtggattttctgctccagcaggccaagcgccatcgcaaagccatacagcgtcgccgcaggcgttggcgggcagcctggaatatacacatccaccggtacgattttatccgtaccgccccagacgcagtacagatcatggaagatgccgccgctgttgccgcaggccccataagagatacagattttcgggtccggcgccgactgccaggcgcgcagcgccggagagcgcatggcgcgggtcaccgcgccggtaaacagcagaatatcggcatgacgcggcgacggtaccactttgatgccgaaacgctcggcatcaaacagcggcgaaagcgtcgcaaagatttcgatttcacagccgttacagccgccgcagtccacgcggtaaacgtatgccgaacgcttaatatttttcagtagagacgccttcatgctggcgatggattcatccaccgtcatcggtgccggaatgccgttggcgtcacgcgggcctaataaattgctcattagctgacctctttcatatggcgagtcagttcaatacggtcggacggcaccaggcatttctgacgcttacagtccgggcaggtctcaaagctttcgcggtggttttccgcgcggctgtcgccgttgtgcgcaagcagcgcaatggcgtagtcgatctctttctgtaccgcgaaaggacgattacatacgcggcagttgcacagcgcgaagcgggactgttgcaggaagtcttctttcttccacactgccagttcgtattcttgcgacagtttgatcgccgccgtcgggcaaacttcttcgcagcgaccgcagaagatgcagcggccaagattgaactgccacgccagctcattggtcgcaagatcggtttccaccgtcagcgcgttcgacgggcaggcattaacgcaggcggcgcaaccgatgcactgctgcggattatgttccggcttgccgcggaagtttttatcaaccgcaatcggctccagcggataagacgaggtcgccgtgccggttttgataacttttttgataaaggtaaacatggcgattccttatttcagcggcgagtttttacgctcaatgctgtagcgctcaagttctttgtacggcacgactttgctcttcttcttacgcacatcgaccacggtcatccggtcggtacaggagtagcacgggtcgaggctgccgatgatcagcggcgcatcagaaacggtgttgccgcgcagcatatagcgcagcgttggccagttggcgtaggtcgccgcacggcagcgccagcggtacagcttctggttgtcgccagtcatgctccagtggatatcgtcaccacgcggcgcttcagcgaagccgagcgcaaaacggtgcggaatataggtaaagccttccaccatcagcgggccgcccggcagattatccagaccgaaatcgatcatattcagcgaggtgtagacttcgttgatacggactttcagacgagaaatcacgtcgcaaccctgctcgctatgtacttccatcggcagcagaccgtagccgacaaacgggtggtcggcgcgggtgtcgcgggcgtgaccgctggcacgcaccatcgggccgacattactgaagtcgcgggcaatttccgggtccagacgaccgatacccacggtacgctgttccatattcggcgtgctcagcagcatgtccaccagctcctgcacgtcacgacgcatctgctgcgccagttgacgggtctggatcatgtcctctttgagcagatcgcggcgaatcccgccgatcaggttcagaccgtaagttttgcgcgccccggtcagtatttccgccatcttcatggaggtttcacgcacgcggaagaactgcataaagccggagtcaaagccggtaaagtggcaggccaggccaaggttgagcagatgcgagtgcaggcgttccacttccagcagaatagcgcggatcatttgcgcacgctccggcacctgaatgcccatcgcgttttccacggaagtggtgtaggcggtgctgtgggcgaagccgcagataccacacacgcgatccgacaggaaggtgacttcgttataacccatgcgggtttccgccagtttttccataccacggtggacgtagaacaggcggtagtcggcgtcgataatgttttcgccatcgacgaacagacggaagtggcccggttcatcggaagtaacatgcagcgggccaatcggcaccacgttatttttcttgtcacccagctcgttaatgaactcgtaggtttccgcatcggtggtcggcgccgggcgctgacgataatccatactgtctttacgcagcggatagagttcatccggccagtcgtccggcagcaccagacggcgctcgtccggcagaccgaccgggattaaaccgtacatgtcgcgtacttcgcgctcaccccacacggcagccggcacgcgcggcgtaacggatgggaattccagcttattggcatccacttcaacgcggacggtaatccagcacttcgtgccctgctccatcgacagcacgtaataaacggcatagtggccgcacaactggcgttcgtcattaccgaacagtaccgacagccacccaccctgctggtagtaaagaaactccaccacttccggcagatagtttactttcaccgtaatagtcagctgatctttggtctgccaggcttcgtccagcacgacgcccggaaacgcctggtgcagcgccgcaaggtattgttgacctaatttttcttcagacatgctcaaactctcttaaatcacgccgccagcaaggagacgaaggctaaaaacgcaaacccaaaaccggcccaggtcacgcgtgaagtggcgcaaaaacgcagtcgcgccatgctgttttcaaacagggcgatcaccagtacgccgacaatcagcttgacgatggcaatcaccagcgccagcaacagtccgcctgcgctgaaggtttccatctgtccccacggcagaaacacgccgacgaacatttgcagcaccaccagttgcttaaggctgatgccccatttcagcaccgcaaagccgctaccgctgtattcggtcaacggcccttcctgcaactcctgctccgcttccgccaggtcgaacggcagcttgcccatttcgataaaggtggcgaaggcgcaggcgcacagcgccagaatcagcggaatactgcgcgcgacaggccagtgataaatggtatcggcgatattgctgatatgcgttgaacccgccacctgcgcggcgacccacagacccagcagcagaatcggctccaccagcacgccgagcatcgcttcacggctggcgccgatcgcggtgaacggactgccggtatccaggcctgcaatagagaagaagaaacgggcgatggcgaacaggtaaatcagggtgattaaatcacccagttgcggcaacggagatccaacggtgacgaccggcagcgcggtggcgatagtcagcatcacgccgaccatcacaaacggcgtcaggcgaaaaacccagccggaatcagagggcgcaatactctgacgaccgagcagtttgataatgtcgcggtactcctgcaacacgcccggcccacggcgattgtgtagacgggcgcgcgccacgcgagtaataccggacagcaatggcgcaacggcaaatagcaccagcgcctgaattaacggataaaacacactcattttcaggctcctcgtgaaaccacaatcaccaccagcaccgccagctcaatcagcgccagacgacggaacagcaccgcggccgccgcgttctgccagcccggcaccagcgataccgggttcagccatttacgcaatttgagtaccggggcaaaggcctctttcaccggcatggcgaaaccgtacgcggtaatcaccatcgactgctcatggtcgtagccgcacacccaggccgcgccgcgagaacgcgacggcagacggttgcctttgaacatcgccataatgatgaacggcagtagcggacaggcgaccaacagcagcgtgatcatcggctgcgatacggtggtgtgcgcggtctccagcggcaacggtaccgcagtggaaatcatcggcagcagccacggcgcggcaaccccaccaatcacacagcagatagccagcgcaaccacgctgacgcccatcaggataggcgcgcagctggcgttttcagcttccttcgtgcgcggcgcgccaaggaacgtcacgccgtaaactttcgccatacacatcaccgccagcgcgccggtaatcgccaggccaaccgccagcagcggtcctaacagacgaccaacaaacgcgccgctgttgcccagtttgaagaaggactggtaaatcacccactcgccggcaaagccgttcagcggcggcaacgcagccatcgccatcagaccgaccagcatggcgatagaaataaccggcatccgtttaccaataccgcccagtttttcgatatcgcgatgaccggtacggaaccagatgctgcccgcgcccagaaacagcacgcttttaaacaggctatggttcagcaggtgatagagcccgccggtcagacccagcgcgatcagtaccggctgattgagagcaatcccggtaacgcctgcgcccagaccgagcaaaatgatgccgatattttccagcgtgtgataggccagcaggcgctgaatgttatgctccatcagcgcgtacagaccgccgacaaaggcggtgatcatcccaagcaccaacagcgccacgccccaccacagcggcgcattgccgccaagcagagatagcgtgagaatgcccagcagcccgattttcatcaccacggtcgagaacagcgcggcggcgggagcgctggcgttggcgtgcgcctgcggcacccaaccgtgtagcgggataatcccggccagcagaccaaagccgataacgccgagcagccagatatcggagcccagcggcagttgctgagcgcgttgatccagcagccccagatccagcgtgccgtagcgctgccacaccagccagcaggcgattgccagcagcagcgtaccgagacggcccagcgcaaaccacagtttgccctctttgctaccgccggtgaggaacacggcgcagagcgccatgatttccgccatcaccaccatcgtccccaggttactggcgaccacggcgcagacggctgccgccatcagcaggttgatcaacagtccgttggcttttacctgtggatggcgatgccagtcgatattgaacaggctgacgaacaggccgcacagccccagcgtaatcagccagatagcattcagcggcgttatttgcagcatgtgaccggtaaacggcatcacgccgctcaccgtaacggcgctggtcagtgcggtgaaccccgcgccagccgtacacaggctgccgaccgcgccgccgataccggcaatccagccgctcagcgctttatgaaacgaaaacagaaacgccagaacggcggcggcggcaaaccacgcgacgccgctagtaatcagtgaaagtgaactcattatgcatccccactctgagcctgctgaaacaaggtgagatcgccaaaatcggtattaaacgtcagctcacgtttacgtttgctggcgcgggcgatatccgtgttctccaccaggtgtagcgctttagtcgggcacatccgcacacaggccgggccttgctcgtcaaagctgcacaggtcgcatttcaccgcgatagcgcgtacgcccggcacccagtcgagcaacgtactgacgcgcgcaggcgctggcggcgcgggcggcgctttcggcgtattggcgttcgccggaatatgcagcggacggctgccggaaaactcaatagcgccaaacggacaggcaataccacacagtttgcagctcacgcacaggctttcattaagctggacagcgccgtcaacgcgattaatcgcgttaaccgggcataccgtggcgcatggcgcatcttcacagtggtgacaaagctgcggcgcagattctttttcattcagcatcactttcaggcgcggcattgactgcaggccatgctggcgatgcgtctctgaacaggcggcctcacaggtgtggcagccgatacagagagtggagtcagcaattacaaaacgattcaccaggcattcctcaggtgattgtcatttttgacgaaaacatgccgttgaaatgtcattttcgacacttatcgacacgcccatccccaaaacattcatgacgtggcgcaacgccacatcgcgaatcaaagcgggcaacacctcaggcttataccgccgggctgtttccctttaccaattgacgcaaattaaccggcgagttggtttctacagcggtatagaggctgtcgtaaacgctggcgattttttccagatagtgctccagcacctgctcgcgatcgcggttgttaacccgttcatcaaccttgccgtcgatatcgagctgcgcctgtgcaatcaattgcttatcttcgccatctttggtttcaacgtagtactcaatggtgtggctgttaaaaccatccgccaacgcgacgtaaatacgaaagtgctcaaacaggacaaagcaaagatccctttccggcgcgcagctcattgcgtgatgcaggcgcgctttcgagagggtgatcccctgaaccagcgagttgcagtaaatatgccactggtcctgtaggcgacgatgccgttgcgcgatgtaatcggccttttcgcttatttcccaaatagtcatgtcaggttacccgtttaacagagatgcctgcgttaagcattttccatgccaatttttaacttattgtttttaatagcagacgagcgcagttactgccgtttcgacgcggtgacgacatgtcatttcgtcatcgtcgacattaccctgccaggggataaaaatattggcataaatattgcttcacaggggcaaccactacgggaggcgatatgcacgaaatcaccctctgccaacgggcactggaattgattgaacaacaggcttcagcatacggtgcaaaacgtgtgacagccgtctggatcaaaattggcgcattttcttgcgtggaaaccagcgctctttccttttgttttgatctggtatgccgcggcacgatagcagaaggttgtaaactgcacctcgaagaacaggaagccgaatgctggtgtgagcattgtcaacaatatgtcacgttgttaacccaccgtgtacgtcgttgtccgcaatgtcatagcgatacgctgcgaattgtggccgatgacggcttacaaattcggcgcatagagattgatgaaactgaagattaatgccggatagacgctcgcgtcgccatccggcagaaagcctgtaacaagaaaaagatcaggagtaagcgatgtgtacgacttgcggttgcgctgaaggcaacctttatatagaaggcgatgaacataatccgcactcagcgtttcgtagcgcgccctttgccccagcggcccgcccggcgctgaatattaccggcattaaaacgcctgactttgccccaagtcagaccgcagaaggcgatctgcattacggccacggcgaagccggaacccacgcgcctggtatgagtcagcggcggatgcttgaggttgaaatcgacgtgctggacaaaaataatcgtctggctgagcgcaaccgcgcccgtttcgccgcccgccagcaactggtgctcaacctggtgtccagccccgggtccggtaaaaccaccctgctgaccgaaacgctgatgaaattgaaagaccgtgtaccgtgcgcggtgattgaaggcgaccagcagacagtgaacgacgccgcccgcatccgcgctaccggcacgcccgccattcaggtcaacaccggtaaaggctgccatcttgacgcgcaaatgatcgccgacgccgcgccgcgcctgccgctggatgaccacggtattctgtttatcgaaaacgtcggtaatctcgtctgcccggccagcttcgatctgggcgaaaagcataaagtcgcagtgctttccgtgaccgaaggtgaagataagccgctgaaatatccgcatatgtttgccgctgcgtcgctcatgctgctcaataaagtcgatctgctgccctacctcaattttgacgttgagaagtgcatcgccagcgcgcgtgaagtgaacccggagattgaaattatcctgatttccgccaccagcggcgaaggcatggatcagtggctggcctggctggaggcgcagcgatgtgcataggcgtgccgggtcaaatccgcgccattgacggcaatcaggcaaaagttgacgtctgcggcattcagcgcgacgtcgatctcacattagtcggcagttgtgatgaaaacggtcagccgcgtctgggtcagtgggtgctggttcatgtcggattcgccatgagcgtcattaacgaagcggaagcgcgcgacacgctcgacgcgctacaaaatatgtttgatgttgagccggacgtcggcgcactgctgtatggtgaggagagataatgcgttttgttgacgagtaccgtgcgccggaacaggtaatgcagctcattgaacacctgcgtgaacgcgccgcccttcttccttacactgccgaacgtccgttgcgcattatggaagtctgcgggggtcatacccacgcaatttttaaatttggtctcgatcagttactgcccgaaaacgtggaatttattcacggccccggttgtccggtctgcgtgctgccgatgggacgcatcgacagttgcgtggaaatcgccagccatccggaggtgattttctgcacctttggcgatgccatgcgcgtgccggggaaacagggttctctgttgcaggctaaagcgcgcggcgcggatgtccgtattgtttactctccgatggacgcgctgaagctggcgcaggataacccgacccgcaaagtggtatttttcgggctgggctttgaaaccaccatgccgaccaccgccatcacgctgcagcaggcaaaacagcgtgacgtgcgaaacttctactttttctgccagcacattacgctgatcccgacgctgcgtagcctactggagcagccggacaacggcattgacgcctttcttgcgccaggccacgtcagcatggtcatcggcaccgaggcgtaccagtttatcgccgccgattttaatcgcccgctggtggtggctggattcgaaccgcttgatctactgcaaggcgtggtcatgctggttgagcagaaaatagcggccctaagccaggttgaaaaccaataccgtcgcgtggtgccggatgccggaaacatgctggcgcagcaggccatcgccgatgtgttctgcgttaatggcgacagcgagtggcgcggtctgggcgtgattgaatcctccggcgtccacctgacgccagagtatcagcgctttgacgccgaagcgcatttccgcccagcgccacaacaggtctatgacgatccgcgcgcccgctgcggcgaagtgctgaccggcagatgcaagccgcatcagtgcccgctatttggtaaaacatgtaatccagagaccgcgttcggcgcgctgatggtctcttccgaaggcgcatgcgccgcctggtatcagtatcgtcagcaggagtgtgaagtttgaacaatatacaactcgcccacggcagcggcggccaggctatgcaacagttgattaatagcctgtttatggaggcctttgccaacccgtggctggcggaacaagaagatcaggcgcgtctggagctggcgcaactgacggcggagggcgaccgtctggcgttttctaccgatagctatgtgatcgatccgctctttttccccggcggcaatatcggcaaactggcgatttgcggtacggcgaacgacgttgcggtgagcggcgcgatcccccgctatctctcctgcggctttatccttgaagaagggctgccgatggagacgttaaaaagcgtggtcaatagcatggcggcgaccgcgcgggaagcggatatcgccattgtaaccggcgacaccaaagttgtgcagcgcggcgcggcggataaattatttatcaacactgccggcatgggggcgattcccgccgatattcgctggggcgcgcaaacgctgagcgttggcgatgtgctgttagtcagcggtacgcttggcgatcacggtgccactatcctcaacctgcgtgagcaactgggactggatggcgagctggcgagcgactgcgcagtattaacgccgcttattcagacgctgcgtcatattgacggagtgaaggcattgcgtgacgccacgcgcggcggcgtgaatgcggtcgcccatgagtttgcgacgtcctgcggttacggtattgaattgtccgaatccgcactgccgctcaaacctgccgtgcgcggcgtctgcgagctgttggggctggatgccctgaactttgccaacgaaggaaaactggtgattgccgttgaacggcaggccgcagatcgggcgttggcggcattacgcgcgcatccgctgggacgtgatgcagcgctgattggcgaagtcgtggaacgcaaaggcgttcgcttagccggactctatggcgtgaagcgaacccttgatttgccacacgccgaaccattacctcgtatatgctagcagcctgttggcagcatactgtaggccggataagacgcatttgcgtcgacatccggcattaacgctgcatgaacgcctgatggcgctttgcttatcaggcctacggagtgtgtgaccagcgagtttgcggtcagccatccggcaataacttacgacttatacctataattcatttaccgttttcgcaccgttttgcggtattttcctggaaaagcaacatgtcgtatacacccatgagcgatcttggacagcaaggcctgttcgatatcactcgtaccttattgcagcagcccgatttggcgtcgctcagtgaagcgctttcgcaactggtaaagcgttcagcgctcgccgacagcgccggcattgtgctatggcaggcgctgtcgcaacgcgcacaatattatgcgacgcgagaaaatggccgtcctgttgaatatgaagatgaaaccgtactggcgcacggcccggtacgtcgcatcctttctcgccccgatgcattgcactgtaatttccatgagtttaccgaaacctggccgcagcttgccgcgagcggcctctacccggaatttggtcattactgtctgcttcctttagccgcggagggccgtattttcggcggctgcgaattcatccgtcaggaagatcgcccctggagtgaaaaggaatatgaccgtctgcatacgtttacccaaattgtcggcgtggtcgccgagcaaattcaaaaccgggtaaacaataatgtcgattatgatctgttgtgccgcgaacgcgataacttccgtattctggttgcgatcaccaacgccgtcctgtcgcgtctggatattgatgagctggtaagcgaagtcgcaaaagagatccaccactatttcaatatcgacgcaatcagcatcgtgttgcgcagccatcgcaaaaataagctgaatatctactccacccactaccttgatgagcatcatccggcgcacgaacagagcgaagtcgacgaagccggcacgctcacggagcgcgtctttaaaagtaaagagatgctgcttatcaacctcaacgaacgcgatccgcttgctccctacgaacgcatgctgttcgatacctggggcaatcagatccagacgctttgcctgctgccgttgatgtccggcaagacgatgcttggcgtgctcaaactggcccagtgcgaagaaaaagtgtttaccaccgccaacctcaagctgctgcgtcagattgccgaacgagtagccattgccgtggataatgcgctggcctatcaggaaatccaccgactgaaggaacgcctggtcgacgaaaacctggcgctcacggagcagcttaataacgtcgacagcgagtttggcgagatcatcgggcgcagcgaagcgatgtacaacgtgctaaagcaggttgagatggtggcgcagagcgacagtaccgtgctgattctgggcgaaacgggaaccggtaaagagttgattgcccgcgccattcacaacctgagcggacgtagcgggcgcaggatggtaaagatgaactgcgccgcgatgccggcggggctgctggaaagcgatttgtttggtcatgagcgcggcgcgtttaccggcgccagcgcgcagcggattggccgtttcgagctggcggataaaagctcgctgtttctggatgaagtgggcgacatgccgctggagctacagcctaagctgctgcgcgtccttcaggagcaagagtttgaacgtctcggcagcaataaactgatccagaccgacgtgcggctgatcgccgcgactaaccgcgatctgaaaaaaatggtcgccgatcgcgaattccgtaacgatctctactatcggctgaatgtttttccgatccagcttcctccgttgcgcgaacgtccggaagatattccactactggtcaaagcgttcactttcaaaatcgcccgccgaatggggcgtaatatcgacagcattcccgccgaaacgctgcgcacgctcagcagcatggaatggccggggaacgttcgcgagctggagaatgtcgtcgagcgcgccgtgctgctgacgcgcggcaatgtgctacaactgtcgctgccggatattaccgccgtaacgcccgatacctcgcctgttgcgactgaaagcgccaaagaaggcgaagatgaatatcagcttattatacgcgtgctgaaagagaccaatggcgtagtggctggaccaaaaggcgcggcgcagcgtctggggcttaaacgaaccaccctgctgtcgcgtatgaagcgattgggtattgataaagacgcgttagcgtaacgggttgccggatctgatccggcctggagatgatgcgcgccgtaggcctggcgcttccccttcacttcttgcgctgatatttttccggcaattccggaacggggcgcttatcgtcgataaggtgccgcacggtcaggacagggtgtcgccaaagcattcgcggacctgcccaacgcataatctgcttcatctcctcgcgtttagccggctgatagcagtgcaccgggcactgcttacaggcgggtttttcctcgccaaatacgcatttatcaagacgtttttgcgcgtaggcgtacagcgcgtcgtaatgcccctgcaccgctgacgcctgtggacactggctttcatacagcgcgatcatttttttgatcgtcagtttttcacgagcgatacgtttaccaggcatcgtgctctctccgaacattaaggtgcatttattttacaccttatccctctttagcactatcactgcatatcgtcgccatttcgcaaataagaattattttcatttattcataccttgtgctatataacatagcaaaggctatattcgatgattaattaaccacattgttgcgagggatactatgacgaatctacatcgtctgaaaacactcctgattgccggtattgtcgcgatactcgcgctatcgccagcctatgcaaaagagaaatttaaagtcatcaccacgtttaccgttattgccgacatggcgaaaaacgtggcgggcgacgcagcggaagtcagctcaattaccaagcccggcgctgaaatccatgagtatcagccaacgcccggcgatattaaacgagcgcagggggcgcagcttatcctcgcgaatggtctgaacctggagcgatggttcgcccgcttttatcagcacctttccggcgtaccggaagtcatcgtctccaccggcgtcaaaccgatgggcattaccgaaggcccgtataacggtaaaccgaacccgcacgcctggatgtcggcagaaaacgcgctgatttatgtcgataacattcgcgacgccctggtgaagtacgatccggataatgcgcagatctataagcaaaatgccgaacgctataaagcgaaaattcgccagatggccgatccgttgcgtgccgaactggaaaaaattcccgccgatcagcgctggctggtcaccagtgaaggcgcgttctcttacctggcgcgcgataacgacatgaaagagctttatctctggccaattaacgccgatcaacagggtacgccaaaacaggtgcgtaaagtgattgataccattaaaaagcaccatattcccgccatctttagcgagagtacggtttccgataaacccgcccgccaggtcgcgcgtgaatccggcgcgcattatggcggcgtactgtatgtcgattctctgagcgccgctgacggccctgtgccaacctatctggatctgctgcgcgtcacgaccgaaaccatcgtcaacggcattaacgacggactgaggagtcaacaatgagtcaatctgcgattaccgttgatcaagtcacggtgacgtatcgcaacggtcataccgccctacgggacgccacttttcaggtgcctggcggttcaatcgccgcgctggtaggcgtaaatggttccggtaagtctacgttatttaaagcgttaatgggctttgtgcatcttgcgcagggagatatcactatcctgcaacagtcagtcaacaaggcgctgaaaaaaaacctcattgcttatgttccgcaatcggaagaagtggactggtcatttccggtgctggtagaagatgtggtgatgatgggacgctacggccatatgggctggctacgccgtcccactgcgcatgatcacgcctgtgttgacgccgcgctggcgcgggtggatatgcaggaatatcgtcacaggcagattggcgagctgtccggcgggcagaaaaaacgtgtgtttcttgccagggccatcgctcaggatggacaggtaatcctgctggatgaaccttttaccggcgtggatgtaaaaaccgaagcgcgaatcatcgatctactacgggaactgcgcgatgaaggccgcacgatgctggtctcaacgcataatctcggctccgtcaccgagttttgcgactatacggtaatgattaaaggaaccgtactggccagcggccctaccgaaaccacgtttaccgccgcgaatctggaacaggcgtttagcggcgttctacgtcatatcgcgctaagcggaggtgaagagcacatcatcaccgatgacgagcgcccctttatttcccggcgcgtggccagcggaggaaaatcgtcatgaactggcttgttgagccgtttggctaccagtatatgctcaacgcgatgtgggtctccgcgatggtgggcggtctgtgcgcgtttctctcctgctatttgatgctcaaaggctggtcgctcattggcgatgcgctatctcactctattgtgcctggcgtcgctggcgcctggatgttagggctgcccttctcgctcggcgcgtttctttccggcggactggcggcaggcagtatgctctttcttaaccaacgctcacgcctgaaagaagacgcgattatcgggcttatcttctcctctttttttggcgtcggcctttttatggtgtcgctcaatccgatgtcggtgaatatccagacgattattctcggcaacgtgctggcgatcgcgccagcggatattgcgcaactggcgattatcggcgcagtctcgctgacgattctgctgttaaagtggaaagatctgatggtcgtctttttcgatgaaacccatgcgcgttctatcgggcttaatccgggtcgactaaagctgttgtttttcactctattgtccgtctctaccgtggcggccctgcaaaccgttggggcgttcctggtgatctgtctcgtcgtcacgccgggcgcgacggcctggttactcaccgaccgttttccacgtctgctcatgattgccgtcgtgattggcagcctgaccagttttctgggcgcatggcttagctactggctggatggcgccacgggtggaattattgtcgtcatgcaaaccttactgttcatcacagcctttattttcgccccgaaacacggtctgttagccaaccgtcgacgcgcccgcctgcagaaggagccgacatgttcttaacaacgttactggaaccctttcagtttgattttatggtgaacgcccttatggtttcggtcattgtggcgattccctgcgccttactgtccgtgtttttagtgttaaaaggctgggcgttaatgggcgatgcaatgagtcatgcggtattccccggggtcgtgctggcatatattgtggggatccccctggcgattggcgctttcattgccggattattttgcgctatcgcgaccggctatctggacgataacagccgcatcaaacgtgatacggtgatgggcatcgtcttttccgggatgtttggcgcaggtctggtgctctatgtttctattcaatcggaagtgcatctggatcacatcctgtttggggatatgctgggcgtatcgctgggggatatcgtacaaacgtcagttattgcactgggtattgcgttaatcattgggctgaaatggaaagatctcctgctacacgcttttgacccgcaccaggcgaaagccagcgggctgaatatcacgctactgcattatggcctgctatgtatgattgcgctgactatcgtcgccacgctgaaatcggtgggtattattctgtcgatttcattgcttatcgcccccggcgcaattgccattttgctgacgcgacgctttgcgcgcgcgctgggattagcggtgagtctgtcagttattaccgcttttgcgggcgtctatctgtctttttatcttgatagcgcgccagcgccgaccatcgtggtattatttgccatcgtgtttattgcggtatttatttacgcaacatggcgcgacaggcgtaatgaaatcgtaccagaggcgcaaggttaacacttttttgcctgctattcaggaaacatacggtcataatatagagtagtcttatggcgctggaaggatttcctctggcaggcaaccttataatttcattacgatttaagtaaagacttatattcagctatcctttttttatgagcggatatagagagttttttatcgtttagcataacggcattgttatcgaatcgctcataaagcgtttcattctttttgtttactatactgcttcccgccgccggattggcctccacatattcatttaatcgttgtacgccttgagtatgtttgtaaaaactcaccggcagataacggtctgctttatcggacgggagaaaaggttcttcaccacacagacgttcacaaatattatcttcatgaatttttactaagttcataaattcaagctgaagttttttggcgagcgccaggctaaaaataccgcattcagaagagcttcgttgaatgtccagctcgaccatagcaaaataacaatcaggcagttgttcacgttcaagagctgctttggtcctcaacgccagtaaagcaggtccaaaagcgctacacgctgctggttcgaacaaaatcaccgatgtctttccgtccataactctaaaatcgacgactgaaatatggatacctgaacttcccatatttacgagaaatcgggcagattcaacgccttccattctggtctcctttatagaggaaacaagctcatggactgacataacaaatttaagatttaactctggatacttcttattggcctgtgcaacaagaaaaggcatcatttcgagatcggtttcctcgtaactgatatgaatccagctgccatctataatttcactttccagacgctcaacaatacaggtcaatgcttcggtgtttagctccccgctgacgtcaggctgaggcgataaactcgcccccatattacgagtcgtaggacttagcatacttttccctccacatgatagctcctgcaccgaaaatatcatctttaacttttcagattcaatatattgcctgcaaaaatatgcctcaatgattgagccaggctaccaaccacctccggatgattatatataagaattactactcaaaaaatcttttttataataaaagctcaacacatggtcataaatgataaaaaatattttaattcattcctaccgcaatcggtaacgcgcaattatcgtcaggtacagcagggttatgtgcaaaagcagtgcgctgtaaatgcgcgtctagtttcagtccccggaacagcgatagcggtgaagagtccatccccaaacgatacataaccttcttacgataaatactgacggtttttgttcccagaccaaattttttcgccagttcaattgccggatgtccggaggataataatatcagcagcgcatatttcgcctgcgtgacaccgggaggtagattccaccaggcgtattgattgatattaaacaatacctcttccggcgtctcgccggcattaaaagcatacgtagcagccacggttttcttttgtggcctgtggcagaaacgcagccaggcttccggaagacggagcttctctcgctccgagcggatagcgcaggatagttcgtcttttaaaacataatccataacgccaaaatattgcagcacacagcgatcgatataatacaagcgatctgccactaccaaaactttacggttctgcaaccgcgtcagcaacgcatgaaaaagataaacatgctcatgcgggttcaaagctaaaatcagcccggcgtccggcatatcggatagagaatgcaaaagtgcggttaatgagttacacgttttaacgcacttttccggatatttttgcttaaaaatagactgaagggcataacaattagtccagttaataccgtatataattacatttctcatttatttatccttttttgaaaactgaccacagcttcggtaatgatttttcttcctgggcgactactgcgcaagtagataacgccttcttactacaaaggtaataagaccagatacgttattacatgcgcaatgtcgttaccgaaatgaattccttttacaaatctgataatgattaaatttgctgttttactttactgtaatctcttagagtacaacgattgcccggcgcctggtggccatgtatgtctgacaatgaacgctttcgattccctttcattaactacatatcactggtgtagcgatactgaaatatacactacgattaaaaaaatatttggtatctgtaacgcaaacagatagtaacgtttaaaataatttcacaaatcaatggttcatcgtacgcataaagctaagcggtgtaatcttaaaatgccgtttaaaaatagcgataaaataagaaggcgtatcatagccacacatcgtcgcgacttgtgaaatatttccagcccccatacgtaataattttatagcctgattcatacgagcatctaggtatattttgctaaaactcacctcttcagcggccagttttcgcttcagacttgatacgctcataaacagctttcccgccacctcagcctgtgaccatttgcgggtgagatcgctgataataatgttataaactttctcttttgtcgtaatttttattgctcgctcaaggaaatcaaacccaccgggcttacgtacaaatgccgatataagatacatcaatgagaaatatgaataatcatgatcatcaatactcacattactacaaacccgtggacatgccacaccatgcaaaatagagtcaaaagtatcactcatccctggcaacaagtccgcatgaaaaaaatactttggtttcgtttttaatgatagctctcgatcattatagtttcttgtactgtaaaaaactttgtagaatttttgcattaagtcataggaaacttccagtgaagaaaaatcaatatgcccttctatttcgctcatactaagcgtgattgtttgatctttttccaataaaaataaacacggcgcagattgttcgatgaactccccaaattcgttttcaattcgcaaactgcctttattaagtttaaacaataagcagtttgcgacataatagtctcttacgtcagctaatccatttattaatggaaatttgttcggctgttgaaggtgattattgctaatggcctcaactgatttattcattgaaggcaataccatattttatcctgtgtgctataaggaactcaaaatcgttatattcttataaacaaataattaaaactcacagagatgatttaaatccgatttttttattattatagccaataattacattccaacgcgcgttcatttcgtcacaaaaagatacccttacaaactttatgcacaattttgtaatgaaagcttacaatattaatataatcatttcagaataaaacggctggcagacatcttaataatccatatacatcaataagatagacacactggcatggtgcattttctgcattatttgctgatatatacaccataccttatcacaaatcgccagcaatgggggttcaccagtcaattgcctctttgttttccccgcccgataaaataatctcctgcatccaggaggtcatttgtgactgtgcgttcattgtaccaactaataccccgtttaaagcctcatataaatgggtgcccggttcaacttttgctaacatgttttgtagcatagccgtttgctgctcaaaagaaacaaaagccgaatcaccactgttaggatctttgaaggcattcatctcttgataaatgctatctttaagcgtttcagaagaggctgactcaggaagcgccagaagtcgttggtagaatgcatcataaagatcaacgtcgccgccattgcttaaaggcgcgctatccacattattcagcatagcggccctggcactcaacgaaaccacacccgtcgcttcagtatctgctgtcgggaccaaataagaagtcggaatcgtacccggtatcaccttataacctccgcttgcgtttttgtcttccattcatcaataagtgcgttaatggcgttatcagaaattgtccggcagtcttgtggaagttcatcaagatgatgcttaatgacgcctactgccgtttcaacaaattgttcaggtgaaaattctgcgatctgatcgccgcaactcatgataaagcgctgttcctgatgatatttaagattaaaagtgcctggccagttctccataagcaacaccatcagtttttggtgatcttttttcgcattaactggcagtgttaaaaaaagttgcccctcaggcttatcgaaatcccttagccactcatccaggacggttaaaagcgtttcgggatggtcgaccgcagctgaaaataactcgcgggcataaatctgtattttttccatccacttccaggccattgtctgattatcagtaagataagcggcgacctgctgtaacgcgtctatcattccctgctcgtaaccttcctgataggcgtacatccgcaaggtctttgcctcttcttccgcctctcgcaaaatacgcttagcccgttgatgcgcctgctgttctaatctttcaatagagaaataacgttccagcgttttacgctttatcagtatcccctcaacaggcgaaagcggggacggtattgggatatttttgagcatattgtaaggccagtagcaaaattgacatttctacagcatcctgcttcaatgcctcctcaataaatggaggaaaaagcaaaggaaaacgctgtgctaaagattcaggtaaaaattcatttagggcatttaactgtgcatacccgacgctaagtaaaaaccggtgattcggcgccttattgcagacagataaacttgttccctgatgcattgccaaaaatgcttgcgcccaatccggcaggccaagcaaggctccctgccttgccagatcggctctcagtttatggcaaccgagtaaatacgctacctgcggcagtcggcgccactgacgcagccacagctgcgtcagtgagttttgaatacactccttttctccgttcttaagccgccatgccgccagtattaactcatttgccgccgccctggcggcgggtctgacaatcatttccggcgctatctgcaaccgctgaggatggatatacgataacggatcaaaaatgattctttgccagataatgggtaatggctgcctattcatttgacgatttcgccttatcatcagccgttatgcctttcttattgcgggcataatggtttttgtaataccagacgccaaagcctgctgacatcacggataacaaaataatcaacacaatccaactggttgcaaaagaattacgttttactggtgtgccgggagcctgtaattgggcatcagaacgttctgacaacacaacagaaatgttgtcataatccacatcggcaaaactattctttaagaaacgcttgatatcgctgatctgatgcgcaagcggcgaacctcgttcatatacggctaatgccgacagatgaacaggttttggcggacggccattttcaccagcatcaatatcataactaatatggaccctggcggagagcacgccctccatcgtctgtaatgactgttccagtcgctgttcaatagccgaatataacctggccttttcagctcgcggagacgataccagcgaatccgccgggaacatctgcgctatttccacccgtggccggggaggaagctgataagttttaatccagtacaccgcagcggtaaaatcaggctcagcaacggtaatgctatagcccaattttccgctatcaattttattcgcctctatattgtgcatttgcagaacggcaatgacctcattagcctgttcctggtccagtccttttaaaagatccttatccttacagccggcaagggtcattaccagcagaaaggtatatagatatcgacgaatcatgagcgtaatagcgtttcaacagccccgactcctttacgagtaagggtacttaccatagaaacatacaggttataatctgaaatcatctcttgcgaaatagccagctctttaggatccgtcaccagattagggtcctcaatcctgttggtaatcgtctgtttatccacagccgtggcaatcgccgaaccagaaaaagcctggagtagccggtcatccagcgagacaatgtccgtctccatagacctgatattgaccgcctgccctataacggcattctctgggacaatagttgcaatcgacataatccaccttataactgattaacggaagttctgaataatggcagcatcaatatccttaaagacttttaccgtgttcgattgcgcgttacggtacaagttatattccgagagcttactctgatacgccgccagtagcgccggatcggagggttttgctgctaatttatccagcgcctctgttacctgcgtttgtagattatcaacgcccgtatcaaattttgctgagacgtcatccagatagcctgaccaaggtgttgccataatgacttccttatttacgttaaattaaagtgggcttgggaaataccaatggcctgggctcattttgatataaccttccgccccgtactgaaatgagcgccccttgagccagtcatcttttaattcgatcgcaaactgcacatagcgtcctccccatgtgcggtaatagctatcgacaaattgacgggctctgagtatttctacatcatcgagcgccccctgaataacaaacgttacgccccccttatgattcctgcgggaataaggtaacgcctgctgttttagccccgcttccgcctggcctgctgcggtaacatcgtccatcaacgtgatgttaaccgaatccgcgtaaggcattagcgctctcagcttttgacttaacatctcgagctctttcttgctcatcgtgtttcgctggcggcttagccagaaaacgggtttacgcggctcatcgaaatgaatccgataataagccagctgcggataataggtatccagccagatagagatacgcttattttcttcgttttcgttaatcactcgcgcatttttatcataatcgcccctcgctaaaacctgacgagcccacagcgtatctctttcattttgcgcagcgacatagagcattttgtcccggcctggcaacacctgaaaacgctccttctcctgccccaataacgaatcgagctctgcggcctgccgctgcggcgagttaagtatccataacgtccccacagtcccaattcccaatataaaaaacccggccagtgctgctacaattccgtttttaaaacgcggctcgttcttttttgcagacgtttctaacttctcaggctgctcgggcacccacggctcgctttccgggcgaatcaggataagcaattcaccgacctgtattggcgtatttaattgcaccgaacgagattcagaatttccttctttcagctcatggagtataatttcggtcgtatccgtatccacctggatttcaaaatttactccgccatggtccagcgggataaaaaagctatcggcaggtatatcagggagttggcctgaagcagtgagcgcatcactctgacctaccacaaagagtgttcggcctgtcagcaatggaaactcacagccgttcagtgagctgttaagtaatcgaactatgtatggcccagggcttgttatcgtcttctcttttgatgtttccatatatactgttagcgatgtctgtcgttctcgatagcagcagattaccgcacaggacacagggattcctgatgaaaatagaatgaaaagtgagaaataaaatcaatttattctgtataatgcgtctcaacacatattaaaagaaccatcatccccattggggcttaaactactgtagataaattacccaaatttgggttcttttggtgtaacaatcagaccattgccaacacacgctaataaagagcatttacaactcagattttttcagtaggataccagtaaggaacattaaaataacatcaacaaagggataatatggaaaatgtaacctttgtaagtaatagtcatcagcgtcctgccgcagataacttacagaaattaaaatcacttttgacaaatacccggcagcaaattaaaagtcagactcagcaggttaccatcaaaaatctttatgtaagcagtttcactttagtttgctttcggagcggtaaactgacgattagcaataatcacgatacgatttactgtgacgaacctgggatgttggtgctcaaaaaagagcaggtagttaacgtgacgcttgaagaggtcaatggccacatggatttcgatatactcgagataccgacgcaacgacttggcgctctctatgcacttatcccaaacgagcagcaaaccaaaatggcggtacccacagagaaagcgcagaaaatcttctatacgcctgactttcctgccagaagagaggtatttgaacatctgaaaacggcgttctcctgtacgaaggatacaagcaaaggttgcagtaactgtaacaacaaaagttgtattgaaaatgaagagttaattccttattttctgctgttcctgcttactgcttttctccgactcccggagagttatgagatcatccttagctcggctcagataacgttaaaggagcgcgtttacaacattatatcttcgtcacccagtagacagtggaagcttacggatgttgccgatcatatatttatgagtacgtcaacgctcaaacggaaacttgcagaagaaggtaccagctttagcgacatctacttatcggcaagaatgaatcaggcagcaaaacttttacgcataggcaaccataatgttaatgctgtagcattaaaatgtggttatgatagcacgtcctacttcattcaatgtttcaaaaaatattttaaaactacgccatcgacattcataaaaatggcgaaccattaacattttttgtatctgtcacttaagtaaagatttttattaaaattgtaataatttaaaattcagactgcgcattaacacgctctatcaggatgggaggctattcaatatcattgttctgtccggaagacagcttatactgatatctctggtaatttaaagtaaggctgattatataacacgatttttgtgaacttgtcatcgctatgatgactggtaaaacgatattgccttattcacagcgtaagaattcgtccagatgacactatctccttccggctttaaccctgtggattaaggccggcattttattcatatttatacatcatccgttccctctgagaactatttgcctgaacggtttataccgaaacagtcacgcttgttagctttctgccaggcatacctcctctcttcctcctgatatcgatataatgcctggggccagcctgaggatgatactgctcataaaccccctgcctttttgacgctataactgaagggagtaaagaaaagacgatatcattattttgcaaaaaaaatataaaaataagcgcaccattaaaaacagtctttcatttatattttggaacctaagacaaattacactcttaaactttcaacgaatggtcatttagtggaaatcttcgagaaaaatggttctgatggtgtaattatcagaccattaaccatgaagatataataagcagcatttacaccccaaaaaaatgcagtaagatagctacaaaactaatctctattgcaatgaggccaagttaaatatgtaaatatttagatgccaggcgctgactctctctgcaccaggatatacggcagcgtccattcgataatcacggttagttataacaatattattaccaacatgtcagttatttaaagcacaggcataagctaaataatcaaatgttaaaaacatataaacccgagcccgtagaatatgacattaagctcataataaaagctcaacctgaccgttagtactaacagcagaattactgaaacagtagattctatcctaacgacttgtattagttattataacttttcaccctgtaagagaatacactattatcatgccacattttaatcctgttcctgtatcgaataaaaaattcgtctttgatgatttcatactcaacatggacggctccctgctacgctcagaaaagaaagtcaatattccgccaaaagaatatgccgttctggtcatcctgctcgaagccgccggcgagattgtgagtaaaaacaccttactggaccaggtatggggcgacgcggaagttaacgaagaatctcttacccgctgtatttatgccttacgacgtattctgtcggaagataaagagcatcgttacattgaaacactgtacggacagggctatcggtttaatcgtccggtcgtagtggtgtctccgccagcgccgcaacctacgactcatacattggcgatacttccttttcagatgcaggatcaggttcaatccgagagtctgcattactctatcgtgaagggattatcgcagtatgcgccctttggcctgagcgtgctgccggtgaccattacgaagaactgccgcagtgttaaggatattcttgagctcatggatcaattacgccccgattattatatctccgggcagatgatacccgatggtaatgataatattgtacagattgagatagttcgggttaaaggttatcacctgctgcaccaggaaagcattaagttgatagaacaccaacccgcttctctcttgcaaaacaaaattgcgaatcttttgctcagatgtattcccggacttcgctgggacacaaagcagattagcgagctaaattcgattgacagtactatggtttacttacgcggtaagcatgagttaaatcaatacaccccctatagcttacagcaagcgcttaaattgctgactcaatgcgttaacatgtcgccaaacagcattgcgccttactgtgcgctggcagaatgctacctcagcatggcgcaaatggggatttttgataaacaaaacgctatgatcaaagctaaagaacatgcgattaaggcgacagagctggaccacaataatccacaagctttaggattactggggctaattaatacgattcactcagaatacatcgtcgggagtttgctattcaaacaagctaacttactttcgcccatttctgcagatattaaatattattatggctggaatcttttcatggctggtcagttggaggaggccttacaaacgattaacgagtgtttaaaattggacccaacgcgcgcagccgcagggatcactaagctgtggattacctattatcataccggtattgatgatgctatacgtttaggcgatgaattacgctcacaacacctgcaggataatccaatattattaagtatgcaggttatgtttctttcgcttaaaggtaaacatgaactggcacgaaaattaactaaagaaatatccacgcaggaaataacaggacttattgctgttaatcttctttacgctgaatattgtcagaatagtgagcgtgccttaccgacgataagagaatttctggaaagtgaacagcgtatagataataatccgggattattaccgttagtgctggttgcccacggcgaagctattgccgagaaaatgtggaataaatttaaaaacgaagacaatatttggttcaaaagatggaaacaggatccccgcttgattaaattacggtaaaatctgagagaggagatatgcattatttttttatcatcgtaatctggttgcttagcataaatacggcatgggctgattgctggcttcaggctgaaaaaatgttcaatattgaatccgaactactttacgctatcgcccagcaggaatcggcgatgaaacctggcgccattggtcataaccgagatggttcaaccgatcttggcctgatgcaaattaacagcttccatatgaaaaggctgaaaaaaatggggattagtgaaaaacagttgttacaggacccctgcatttctgtcattgtgggcgcttccattttatcagatatgatgaaaatctacggttatagctgggaggccgttggcgcttataatgccgggacgtcgccgaaacgatcggatataaggaaacgttatgctaaaaaaatttgggagaattacagaaaattaaaaggaatgtcagcagaagagaaaaacaaaagactttctatcgcgtcaaacaaataattatacagaaatagcttactttcagatagttctaaaagtaagctatgtttttatcagcgtgccgtcgtcataagcaactgggcttgcattgcttttagttgtacaaactgtgaggcgtcttccagcattctattgttccgtgaattccggaaatctgcacgtacctgctccagattactatgaggattatccttaagtacaagggccgccgccatcgttccggttctccccactccgcccagacaatgaatcatcggtaaatgcttatctgatgaactacgccccggcgcgccattttggttactatttttcaccctatccgccaggtattctaactgatccgtagacggtaacggctggtgatctggccaatttttcacatgcaataccgggattgtataccgcttttccccgcaggacagttgcatattgtattggtctatcgcttctccctgactggctgagctcactttttggctgttggtatgcacctcgccaaaggtgtagctccctctgaaatagggtggtaattgttttgcctgcatctgatcttccgacgttaacaccaccaggcatgagcattctttttcaagaagcattttcatatgcgctgccagcgcatccggcgtattttttgggtacgaaccggctaatgccacaggcttaccgtcaaaagttaacgtattcactggcacaggcattccatcgctcagtttcacctgggtttgctgattaattggaatgctgctgaccgcaaaccgtgccaggcccagtgtcggtccgctcatcgtctgtggcattggcgcgccggcttctattttctcaagttcagctgtaacatttttcagttctttagcaataacgtgaattttttttacagcctgggttaattcatgagtagaggctttatcaacccacctctcaacctctcctccacaggttccccattgtgagaaccgggctacaccgacctgaatatttgttaacgttgtaacataatcattaagttgtttagcctctggaattttatttaaattctgtaaattcgtcattaatgaacgcagcgggccgttacctgaagccatctcctggaagttttctcgcaggctatttccatccatttgttccagttgcggtaatgttcttttaagtccctttagcgcgatatcgagtaaaggttgcttactttctgctccaacatcgttatttttttctgccacttttgtatcgccgccttttatgactaaagcggcattcctgacaccaacattatccttgctcttaataaggtttataaacccttcgtcagcagcttttacacactccgtgatctgcactgctaaacgttgggtaaggggtttgttcatatttatacgggacattaacagtgcgtcattaaccgctgtttccccatatttttccgttagtgcatggagaaatgtctgtaaaatcttttggtcctgtactctgatattttccgtatgtttttgcaccacttcagtgtttttaaataacggcatttttccaagccaggttaatacttttgacgaaaatttttcaggcgcaacatatgccttatcagtattttccttagcaatataaagtcgggcatcattcgacacaccaacttttgaaaacgaagacaacgttaaattattcaattttctctcctcatactttagcatattcctgcagtatgtttttgagcacttcctgctgattcacaaatgactcaagctgcgatataatatggtaagtatttgtcagatcggtaattgcatgtataagcaacaacgtctctgcggcatcaatatacgctaacgtaccttcattattcgcagccagttcaccattaatcaccataatctgccgccagatagaatcgccacaaacaggcgataacggtataatcataccgttcaataaccagatatcatctttagcttcaatagacgtaaaaatatcgctatcgagtaataataagcactgattgttgtcgtcaaaagtgagcggtaaacccaatttctcaccaatattagcgataatatcctggtgtgcttgcaatttactttcctcttgaattatatcttttataagattgcttcttcaaatttaatctggttacacaatgtcttgatactttttcgcgcccatcgccgggcgcaatatttctctcctttaatccagtagaatagccattcactacgcatcggaacacatatcagcagctccttcggatcattttcaacatgacgtaacttgcctttaataacaaaacgcgaactgtcagcaatatcatcatatattgcagccatacctgaaccgggtactacatgtgtgatgattttcataacaattaatcttattcaattgttgtcaagcgagagaaaaatactacaccctggactcaagactttttttaacaacacggcatatatccgcaaaggtcgtcatatcaggaagatcgttttcattgcaactaatgtcaaactcctcactaagaccaaatacaatatcaattaaatccaatgagtcagcgtaaagatcctcaaccagatgggtctgaccattgatactatcaacatcaacggcaatacaggaggtgatcacttttttgactcttgcttcaatatccatattcatcgcatctttcccggttaattaacgctgcatgtgcaagccatcaacggtagtaataacccgatccacgccaggtttattcaggtatgactcgtaagccgggccagctcgccagctaccgtctccgataaggccgtccagcacattacttaacacatagtcagtttccccttttagcctggtcagccccgcctctctggcaaactgcagtgcaatctcagccagtttttctttttgtggatgatgagtaatgacctctttgagagtctccattttcgctttcaattctgggtgcttgtcaatatcgctacattgcgctttcaacgctgcactctttatcgtgtcattgggtaatatttccgcacgcaagccgtcaaacgctctgcgtacagggaacggtgtggaggtatctggctccagggctttacgtatcacacccaaaaacgtctcacgggcgtcgaaatgcattgaatgcatattcgtaacgctcggtactgttgagaggaaactattttgcttaaacttcaaaccagaaaatgggccagtcttatctgtctgactattatcattatcggtcgtaccggctttattacctgtaattaccgtcgtgtctgattgtaaggtatcggttttaacattctcgacgccagccagttgactggcaagcggcttcacattcacaatctctgccgtctggctttgctgtttattatcatcaacgccgtgcaccgtggcctgtaccggcttgccgataatgctcttgctggttacgccatcgacttcatcaaaagaggttgtttcacccgtagtgcccttttctgacgtgaccacctttccatctttactttcggatgaagcgttggtcacagcctctgccgtcgcatgagccgtgacgtcaattttacccgcgatgccatggtcaattgcccctgtgctggcgctgtgtgccgtctccgtttgatgcgtagtcgaatccacacgcgaatgactatgacttacgttgctgctgttagtcgaatggtgtgactcgccattgcgttggctgttatcaataaatgttcggctattatcaatcgtcttccggctattatcatggttgctattatcgatatggcgctggctattatcgacatggcttcggctattgttaatatgcttactgttatccacgctatggttactgctatcaatattaatattgatattaatacccgtaggttctgcttttttcccaccatcaggtactggtccagccgcaggctccggaattttagggtcaggcagtttatctgcaggaatttgtgcaaaaacattacgtagcagcaggggtatcaacgtttgcatttcaaggtgccgggcttcccgtcctacgctggtaccctgctcttgcgttaatttttggtggcacatatcaagcgcctcaaccgccttcgccgccgctttgtcaacaaggtgcgtaagattgctgcgggttaacggatctaacgtacagccaaagttatgttcaatgcagctggcaatatagggcatcacctcctgcataacaagattcgtcgataatttacttaattcaccaccagtgttatttttgataatatctaacagctgcttttccaggttttccagcttcgcttccgctttctttgtttctggcagccatggcccaaaagctgacttttctttcaggccatcttttatgatttgcgcggtatactctgcccccaccttcatcagtagcgtcttcgcctcaggagaatcactggtggcgttgagcgctgaacgaaagagcccggcaaactccattatcgctttcttaccggcgacattatttgaattggtaaaaacttcttttaacgcctcagcgtctttcccgcatttaaacaatgcatccagactcgcctgtttgatcagcgcgggaaaatcttccagttgcgggcctttaatttcccctgacagcgtcgttgtggcactttctctgactgcggaaagattcgccgcaagattcgtggcctgcgttttgatctcggtctgcatacctggcattatgacggggggctgagtccttacacttgtaaccattattaatatcctcttctgttatccttgcaggaagcttttggcggtttccaggctgctacttatcgtactgctcagcacttttaccaggttgtcgtacaatgaattggcattgctatatttttgcgtcagcgtctgtaatgtggttttcatattttcttcctgcgctttaaaacccgactgccaggcttgatatttggcgttatccatttcgagttttgagtcttttcccggcgcgcctaaaccatcaatatcctgaaccattttttgtaatggcgtcagatcaacggtgacgacataaccggatccataagatttcaggcagctattcggtaaattcaattcactgagccactgtctcgcttccgcttcagtggctactttaacgccgctgcctgactgcgctggaaataaaacggtattactgtttatttgattatatttattgactaaactgtttaaatcatttttgagtgaggtaacatctagcttaacggtattaccgtccttacctggtaataaccagcctcccattttggaaagaatatcactgaaggcctgataaaaatcggtatagactgcgacaacgttttcataaacgcccagatagctgtcacctatcgccgatatattttgggaaaccatatcccaaatctcagcatcagaaatggttgttctcggctgcgccataggcgaagcgctaaataaggccgacgtcggcgcagaaaacgcgctccgcaggttctcattttgttctgcggataatgacacgccagacttcgccagcgcattcaggctgctggtcaactgctggcgcgccagcgtgcgctcgtcattattctcttcagagatcggtggcgttgactgcagcgtctgctgtgcctgctggattttagtagccgcctgcgataatgaaatgatatctgtaccgcgatgttctgtggtagacggtaccacggcagtctcgacgtgctcgctcgccgagggagtctgcggccgttcggcaacgatccccggatgaggagaagcggaataattttgaatattaagcataatatccccagttcgccatcaggagcgcgattaaatcacacccatgatggcgtatagatgacctttcagattaagcgcgaatattgcctgcgatagcagcaagtgcggatgctttcgactggttaatgctctccattgttttcagcatttcctgaatcaggctggtcgatttacgtgaactttcacgggcttcgtccgatgcggtgctggcaacacggttattcacctggctaatttgctgctcggaacgttcctgagtagcggcgtactgcccggacgcccctgcaataccaccgaccgtgaccgagttcttcataatcagatcgcccgtcatctgcatcttgcgcgcatcaattcgggtcatatccatggtattctgctcaagacgaatatcggattcgacagactcaagacgtttcgacagaatagcctgatgttcaggggagatttgtttattactgtctttaatacccagactttccgtggcgctggttccggcattagatttaagcgtcgcatcattaagattttttgtcgcatcggtaccggttttcttcatatttaacgatttcagagaatcgacgccttcagcaccgagtttgacgctattctgcccgttcagcacgtttttaatactgtggctttcagtggtcagtttatcgatcttcgcggcattatgtttaagcgcgcctctttcattctgcagccccttatattccagtttggcgcccacgccagtgatccccaactgaagcgcgctctgggaaatactaccggacaacgcattcatcccttcgcgcatcatggagcttgctgtcgttttagctgcatcaaagctgactaatgacaacttaccagacagtttgctatcagcctggttcaacgtcagcattaacgtattcgcggcagccaacagcgcaacggcactggaagacattccgctaatatcaaaaaactttccgacttctgcctgctgctcgcgtaactgggtttgcacaacctcattcgctttagtcgtgacattatttgccagagcattcaaatcctgattcatgtcggtattttgaatactggcttttaaaaaggacgtgatcgttccgggggtttgcgttaatacccctggcgcaggcgcgctcagtgtaggactcaaccccaggtcactgactttactgctgctaataccaatactattcagaatatctttagcgctaacggattgcgaagctgtctgtgaactattctcaacagaatgattatttaaataagcggcgggatttattcccacattactaattaacatatttttctccctttattttggcagtttttatgcgcgactctggcgcagaataaaacgcgaagcatccgcattttgctgtaccgcagaagacatggctttttgcagttccgccgttaccttctggttttcaccaaatatttctacggattgtttaagccactgctgaatctgatccatggcaaaacgggcgagcataaaatcagcaagcgcctcgctggcatttttaataaatacgccctcggcaacaccaccggctgactgggctgcggtattcgtgacttccatgcccaacgccactttatttagggtattacctaccagctctttacttaaggcattcgtttgcaggcccatcttgctacctacattacccagaccgctagtaatacgttgcatcccctgggtaaagagtttgctgccgttttgcgccaactgtttcagcacgttaggcaccaacttcttaatcgtttcgcccatcattttgctcagcgcgttacccagtttcgccgccgcgcctttcccgacaactgcgaccaccacaatgaccgccaccatggcaatagcggcgacaatcgcaccaacaatgctgccggccatctctgccgttttcttatcgacgcctaatccttccagcgctttggtaatcgccttgccaatcagctccattaacggcttcagcacatgctccataatcgggtttagcgcctgctgaataaacgacacccccgtcgccgccttcacaatttcatcggccaccattaccgcaagtcccaccgcagccagcgccagactcgccccaccggtaaaaacagcggccacaacgctgacaatggttagcagcgcgccgaggactttcccgatacatcccataatgcggttcgtttcctcggctttgcgcgtctcttcctggaattcagccgatttcttttccatctccgcctgacgcccttcctgcaaggcgttgaaaagcgcaagatcgttttgcaggctttcttccgtatttttgcccacaatctcaataaacatggccatgagcatagtgaggcgggcgacatttgacagattatcctgctcaccctgggaaacctgattctgagaggcggcattagccgttccctggaatttggtcagaatgttatccgctttctcggctttcgctttggcgtctgtgcctgctttaaccgtcgcatccgtggccttatctaaggcctctttcgcctctgtcgcttcttttccggcctgttctaccgcggcttcagcttgtgcatagccggggtcagccgggtccagcgattgcaatttattttgcgcctgcgtcagttttttggtcgcagcgtcataaacactcttggcggtatccgtctttttgatactggcttcatagagatccgtcgcctcctgagcctctcccagagccgtctggaattctttcgatacctgaatccccatctctttttgtgactcaatcatcgcctgccataccgccagacgagactccagttgagacagcgaaacatcacccagtagcgtcattaacttgccaagcagtaatgtcaattgcccttcgctggagagtttttcccgggcggcgtccgtaggcggcttcagacccaccgtattaatagcgctctcgccggactttgttccggctttaaggtcgcccgctttcgttgccaccacatctttaaaagctttatccgccgcttttaaaaagtccgtgttcttacgaacgccttcaaaagccgcctcagcgaggcgcggattttgggtatatccgctacggctaatgctacttgcgtcatttaccataattattccttttcttgttcactgtgctgctctgtctccgccgtttttagcgcctccagatagaccaacgcttttgcccgcagagactcatcttcagtacgttcattgacaagttcaaaacactgtctggcttttgctgccttacgcattaataattgacactgcccggtaaaaaaaacggggcgataatcatttttaagtaacgtaaacgctactgcataaaggtcacatgctttctgaaattgttttttcagttggcataccgccgccagtcccatggtgtaatcgggattgtaaaaatcataaatgcataagaaacgaaagaatgtctcagcttcatccagtcgtccctggttataaaactcataagcatgagcatataaaccgtccatcatatcttgagggatcccatgaacgtcttttagcgtggcgccttcactaacggcatcccaaatcatttccgcaacacgttcttcgctgacattattttgataatccattacttactcctgttatctgtcaccgactttgtagaacttaacgactgcgtttatctgatgcagttattaaaccccgacggtggttagtgaacattcaaaaaacgcccaatgaatacatcgctactgctttacgcggctcaatgccgtacctcgttttcttgtggctgaataacgtctttgcccgcgttttctacctcttccagccaaaccagaagacgtaaaacttcatcaatttcttccagactcaccagatcataacggcgatgggttttgaaaagactgcgcgccagtttgatatcgacgatcacaggtacgccaaccttctccgcataggcgcggacggccagtgcgcgctgattcgtttcatacaccgagatcatcggaatcggcatcaattcgggtttaaaataaatcccgatcgtaatatgcgtggggttggcaacaatcaggcgtgagttttcaatatcagatttcacctgttcagacagaatttccatatgaacttcacgtcttttagatttaacctctgggttcccttcctgctccttcatttcacgcttcacttcttccttatccattttcatatctttcatggtcaggaaatattccgcaatagcatccaataataagacaatcaatgcgcaagcaaggcaagttaataccaatgcgaggagaagttcacgccaaatgacggcaatacctacaatattgccatttagctgagaaaagatttcaaccttatatttcttccaacaaatgatggcggccaccacaaaggatgagagatacagtagggttttgaccgtatctttaaccgtgcgcatactaaaaagtttttttgccccttctaccgggtttaacgccgataaattaggctttaatgcttctgtcgccagcacaaaaccggcctgtaataacgccggtaatgcggaacacactaagcagagcagcataaatggaatcagatattttaaccctatcccaaaaacggccaaactgtagtcagccatgctctgatcaaaattatccgcaataatgatcttaattatccccataaactcattaaatgagccatacgacaccagataggcaattcctcccagcgtcaggcaggcgataatgagatctttacttttaaatgactggccttttttagcggagtcttccagccgttttttagtcggtttttctgttttattcgaggacatgcgtcgcccctcgctcgtaaaaccaactgcttaaccctgtggcctggaaagagagtcgcagtacattgtccggtagtaccggagagaaataaagcagcataattaaaacggcaataccgctttttaccgtcagtgaaatcgcaaaagcgttcatttgcggagcaaagcgcgacaataaacccaggaatacttctgacagcaacagcactaataccaccggactggccagaaccaaggcgttttgagccacctgattaataaacgttaatagcggcggtaatgaaggcgtgcactcgttcatcggatcgcatagctgatagcttttatttaacacgtcaaccatcgtgaccagaccgccgttttgtaaataaacgacagcggcaaacatattcaggaaattagccatttccgaggtatcaataccgtttgccggatcgatactgctacttagcgttgcccctcgctggttatcgataatacaacccagcgcatgcataacccaaaaaggccatgacagcagacagcccagcatgacgcctaccgccgcttcttgcagaactaacgggatcatcgccaccgataaaaacggcggcgcctcgttcaatgcatgcggccatactcccaatgccaccaggatgataatggcgtttctcggcgcgccgcttaataccccgctattcaaaaacggcaggaagaaaaaaatcggcgctacgcgagcaaaccctagtgccgcagacgcaaccaggtgatgaatttcaaagtacaacgcgtaaagcattttttaccccttagccaacgccaggaatatcacctgacgcccgtaagagagtaaaacttcgccataccagccagacagtaaaaacaagcataaacacacgccaagtaatttaatgccaaaaggcagcgtctgttcctgtaattgcgttaccgtctggaataaccctaccaggaggccgataatcgttgcgacaatcgtcggccaccctgacaggatcaaaacaagatagagcgccttattacctgcaaacactaaatcatccatttaactatcccgtctcgtaatgatgtcatgttgcaatgtccatatactgtaatatcaatcccttagacagtaaggtccagccatcaagcgcgacaaaaagcaccaacttaataggtgtagatatcgtcaccggactcatcatcatcatccccagcgccagtagcacgctggataccaccaggtcgacgacaacaaagggcaaatagagataaaaaccaattttaaacgcgctttttatttcgctcagcgcataagcaggtaataacgcaaatattgatggtttttcaatttcatctttgtcacgctttaccgtctcggtctcttctccatactgacgcttcagttgcgcgttttcaaaaaactgaactaactcgcgatctgaatatttgatcagataatcgcgataaccatccagaccttcatcaacgtgtttacttaatgacgaaatatcattaaaggtgacatcttcgtcctcaaaatagacgtaggcatcatgcattattggccacataacaaacatagaaagcagcaatgcgacgccgttaagcgtcatatttgaaggtatctgctgcaatcccagggcgttacgcaccatgacaaatacaatagaaaatttaacgaaacaggttcctgacgcaataataaatggcaacagggtggaaaatgccagtaaggcaattaatgagatatcattccccattaccagactcgctcagccattcatggatctcaacgcctaaggtgtcattcatctgtaccagttcgccattacccagcaaaacaccattcgccataatttcaacgttaagttcagcattggtcggcagtgataatagctgttgctgccccatggcttcgagttcggcgagggtaacgttcttacgatacaaaacaaattccagtttgacgggcaattgattcaagccaggcagagtttctgcagtttcagttgtattattttcttcttcgatatgttgaatatctaacgtttccacaataattcccccttcaacacggttgaaatgacctaactttttcgcgtagcaataaacttccgcacgggaagtacgaatcaggagtacatctccgatcccgattcggcccagcaacgaacgctgcgtatcactgctaccgattacaaagcgcaacggccaacgcagcattttcggcctgccgcccccgactgcaggcagttcaggaagatattcaaaccacaggccgccccgatcgctcataatgtgcaacaatttcccttccggcagcgcgcttcccggcacggggttctctacgcataaacgccgacaggacaaatgcggcacgggcaactcaaacggtcgctctgtcgcagcaagccagggaacgaccaggtgctcagcgccagcagaaaccgccgcccccgccagagcgggagagacatgctcaagccagtccccaggttgaatccacgccgaccaccgtttttctgcatcgctcaaccgaacccacattccttgtcgcgtcggatattccagcgtagcttcctggccatggcgctggcattctgtcgcggtttgcgccaatagccattcgcgacgatcaatctgtctcacacgcaatgacatcaggcgtcatcctcctcgccagattgctgtctgtgctgttgctgctgcggattttgttgatcgtctcgcgtcaggtgccagcgctggggattaccgttttgccattgatcatgcaaacgatgttcaacctgcgtatttgacggtattaacgaaaactcccctgcttgccgcgcctgaatattgacggaatagtcatttccccagcgctgaaaacggtaagtcagcgagctatcctctcctttcacgccatcggcagtcggaaaaatagtcatcatcggctttgattgcgccgctaaaggcattttttcatcgccgccggttaattggctaagatcggcgatagtggttggttgcagcggaagctgagaaacatctttaacctttttatgatctttatcgtcaggcttaccggtattggctgcggccattcgggcaggtgcgacatcccgcgccagcggcgcgccctctttacgaacgccttcgcccgcgatggctttattatccccaggcaatgccttgatattatcgtcagagattcccgtggcgttatcggctacttcactaacggactccacggcttttaaatcagcagataattttttaccgcttacgctttctaacggcctatttttagacgatagcaacgctgcggatttatctactttggcctccgcagaaatcaaaccgacagatttttcagcagtgactttcaacagtttttcagcaatcctgagttcgccttttccgttatgatgcagaccagaaacgttgccattgtgatgttctgatttcgctggcgcgccatgtcgccatgccgccagtaataccggtaaagccgtttctttatgcattacgaaagcatcgccatagtcgcgatcttttttatcaccggaatattctgtcttatgtttttccaccgctttttttaatgcttctgataaaccgccaacctcatcctgctgcggcagtaaaatgttcccggatgaactgacagctgacacatcgcccattaaattatctcctctgactcggcctcttcctgctgtatctctcgctggatatagaatcttttctgacggattatccagcgttgatagttcccttctttgcgcaaccaatatttactttttttctgaaactcttcccttttcttttccagctcgctccgtttttcctgaatttgtataatctggagttctaaatcttttatctgccggcgaacaatagactgcttacgtaataacgtataaatttcctcacgactgagctgtctgttttctgcacgcagcgtatctaataacaatttcagacccgctatttgttcaaggatcgcctcctcctcggcctgcagcccgcggtcctcatcctgatagcgaagtaatatcgactcacactgtgaatgaaataccgtacagcgccgctgcaatactttaattctggtcagcgaatgcattcataccgctcaacgtgtcatcaaaggatgaatactgcgctaccggctggcataaccaggctttcaggctatcccgcatctgcatcgcccgatcgttatcgatattttcgccaggacgatattctcccaagtcaatgaaaagctggagctcttccaaacgcgtcattaatttacgcacggcagatgcctgttcagcatgtgtcggcgtcgtgacttgtccaaaaacgcggcttacgcttttcagtacatcgattgccgggtaatgtccctgcccggccagctttctgctcagatacaggtgaccgtcaaggatagagcgaatttcatccgccatcgggtccgcctcttcctcgctttccagcagtaccgtataaaaggcagtaatgcttccctcgctggtcgcccctgggcgttccagcaagcggggcaaattatcgaatacggaggcgggataacctcgacgggccggacgctctcccgacgccagtgccacgtctcgcaaagcacgcgcataacgggtcatggaatcgataaaaagcacgacccgttttccctggtcgcgaaaatattccgctacggttgtcgccagttgcgccgcattgcagcgatcgaccgaggggaaatcggaagtggcaaaaaccagcacgcatttttctttcttatgcgaagcgcgcaacatatccacgaattcagtgacctcacggcctcgttcaccgataagaccgataacaaagacatccgcctccgtttgctcgatcagcatatgcatcagcatggtcttaccgcatcctgcggaggcaaaaatgcccattcgctggcctacgccacaggtcaataacccgtcaatcgcgcgcacaccggtaatcagcggttcacggacgccaacgcgtgaagcgtaagacggcggtgcgacatcaataacgcgttcttcgctaatcggcgccacttcaggggtaaaacgctcaacgattttccctgtcggatccaacaccgcgcctaataccgagtatcccacccacgccgataacgcacgtccagtgggataaagcacgacatcgcggctcagcccctgggcattgccgataaggctcaacacggtgcgttcccgctgtaagccaaccacctgcgcacgtgcaacaacctgtttttggtgccagccacggcgtatttcacacagttcgccaatggccacatcgcgcaattccgcctcaataattgggccggttattttttgtgggtaggccagatattgcagtaaacgaggtgttttcatctcattagcgaccgactaaaaacttccagatagttgtaaaacccattcaaggcagtagagaacttttcaccgtcagataaaaaatccggatgcactaaggctttaagcgttagctccccattctgctcccccagtagtaattgcccgccgcgggcaaaatggcatccttccatgatggtcattaagatttcataagcccgctgttgtaataccaccatgctgtcagcacccaattgcgcccagatccatacatcatcgtccttgacgctgatacagatacttggcaatgcaaataaatccagaacaattgttgaatggctatctattcctccgatgagtgaaggatcgcaaccacttacttccagtgcggaacgaactaattcagcgatatccaaatgttgcatagatcttttccttaattaagcccttatattgtttttataacattcactgacttgctatctgctatctcaccgaaagataaaacctccagatccggaaaacgaccttcaatcattttcttaataaatcgacggacatcgacagacgtaaggaggacaagatctttatgtgcaatcaataaatcatccaacttaagtgtaatgagatccatcaaattagcggaggcttccgggtcaaggctgaggaaggtactgccagaggtctgacggatccctttgcgaataacatcctcaacttcagcagataccattactgctcgtaattcgccgccattggcgaatttatgacaaatataacgcgccattgctccacgaatatgctctacaaggttaatgacatctttttctcttggcgcccacaatgcgagcgcttccataattaatttcatattacgcacggaaacacgttcgcttaataaacgctgcaaaacttcagatatacgttgtaccgtggcatgtctgagcacttctttaagtaaatcaggaaatttcgcttccagttggtccagcatatgttttgtttcctgaataccgaaatattcattgacgttgcgcgccagcgtcaccgccagacagtggtaaagctcatcaagcgcgttccgcaacacatagccaagctcccggagtttctccccctcttcatgcgttacccagaaatactgactgctaccttgctgatggattgttggattaataccaaaggacacgacttcatcggaataatttaccactcgcatcaaatcaaaatagaccgtaaattgttcaacacggatctcattaatcaacaatacgatgctgttatcgtccaggccctcgccatcgcgtaacaatacttccggcaggcgcacgccataatcaataaagaactgactacgtagacgctccgcaagttgagctttttccagatcttcacgccggctcttcggcacaagtaatatcaacggtacggtctctgtagagactttatcgagatcgccaatcagtcccaacgacgacccttctttttcctcaatactaagcggctgctcgcctttgctggttttaggtttggcggcgctacgttttgcttcacggaatttaaaatagaagagtacgcttaaaaccaccgataaaataacaaataccggcagcgggaatcccggcagagttcccattgaaatggtcaaaatagccgtaacaaccaatacaaatgggttgttcaacagctgcgtcatgatattccgccccatattatcgctatcgccatttacgcgagtcacgataaaaccggcactaatcgcaatcaacaatgcggggatctgggcgacaagaccatcaccaatggtcagcatggtataagtagacagagcggaggacaaatccataccatggcgggtcatccccaccgaaataccgccaataaagttcacaaagataataatgatgccggcaatagcgtcacctttgataaacttcatcgcaccgtcaaaggaaccgtaaagctggctttccctttccagtacgcttcgccgttcgcgcgcagcatccgcatcaataataccggccttcaaatcggcatcaatactcatctgtttaccgggcataccatccagagaaaatcgggccgcgacttccgcgacgcgttctgaacctttggtaataacgataaactggaccacggtgacaatagagaagacaacaaaacccaccgccaggctatcgccaataacgaattgcccgaacgtggcgataatttcaccggcatcggcttcaatcaagataagacggctggtactgatcgataatgccagacgaaagagcgtggtaattaacagtaccgcaggaaacgttgaaaaactgaggattctgtcaatgtagaacgaccccataaacaccaatatcgccagtacgatattcagtgcgatcaggaaatcaaccagataggtaggtaatggaatgacgaacatagaaatgatcatcaccattagtaccagaatcagtaattcaggtcgtaaacgagcactgttaagtagagaaagcagcactataggtatcctgttaatattaaattaagacagcttttcaatagtacgacgctgttctgccatttcatgcttgtaggcaatatcggtcatactacgtaacgccattaacaattcttcctgccaatattcttcataaaagagtgaagagggtatggctttacatacttgataaaatatctgcaaaaaggatgcatgttctttatgactaagcaataacgcattcaaacctataatatcggctaacagcgaatccacttcatgtggctgttgcaatagcgaaagcatcagtagtagccacgacgactcctccgcattaaacgctttggtaaacgaatacgacaacaatgtactcacaaacagtaggtcagcggagcgcaacattttaagttgcgtcaggcgtcgtaaaagctggccaaactccaggcgcgaacaactggcgtcattcgcgtcaatatcggttaatagcgaaccctcaataaaatccagtaccaccagtcgacgttgatagccataactggctatccagtcagagtaaatctccacttcatgtgattcactctggataaattgccgatagctggcgcgcaataagcctggttttaacgataatgttttcccaaaaagccgggccttcaacgcacaattaatccctgccttgagggtcttcggatcggtttgctcttcaacgtgcttaagtaacgactccagctttttccgcacgatctcttccaggtctttacgacgaagcaattcgcgtaacacaaggactaaatcactggggtcaggaaataagctacgcgcctgacgtaaaaaatcttctaacgcgccgccatgtacgctaattagctttaagatttgcttcgccttcggtaaagcctcatcttccagcacgcgttcaaaactgttagataaattactggattttttttcataatcgcgacggttacgaaattgcgccagcgccgctgacatttcgtccgtcgactggacaaatttttgtacttccgcccctggagacgaatcctctgcggcctgttgtatttccgcctgttgcgcatcagtatgctgggtcgcatcctgatgagatgtctgccgggacaatattctggaaaatgaaataccggaggttgagccaggaatcatttaattgcctcctgacctctatccagataaacacgaacccatttctgtaacttatcgtccccactccaggcaccgctttgcttcagaatattgtttaccgattcgctggcatccggcgttaacgggtcgacaatttcttttggttcaatcatgaacacacgaacaacattacttttattcttactggaatagcggaacaggctaccaataagcggtaatttgcctaaaaacggaatactttggacagtatcggtatttgcatcccgtgtataaccaccgaccagcaaactttttccgtgcggcactctcgcaatagtgctaattaacgttcgcccgacttcgggtaacgcatctacggaggtggtagtatcggattgcggcgtcttatcgttgccatcttcaatgtccagcgacatttctatctgaccatctgcggaaaaacggggcagcactcggatcattgttccgtatgttacatgctcaagcgccacattacgttccccaatcagcttggtgtaaaacgttctgttgttatcaaaaatagcgggaacattttcctgggtcagtaataccgggcgtgaaaccaccgtcgcctgtttcttctcttctaacgcattgaccgcggcgatgaatcgactgccatcgagggtacttattgaagactggtttaatgacacgccaagtttgtccccaatagtaatgctgccgctccatgaagtgcccaaacgctccagatcgcttttattaagatcgacaatccacagggataattctacgtgacgtttggcgacatccagcgctttaaccagcatttcgataaaatgcacctgctcagccgttccctttactaacaaactgttggtatccggataggccacgattttaatattgcccgccgcggcattttgctttaaagcttcctgcagactcatgccaccggcataatttgctgctttacctttttctccattcgctgaaaacgctggcatcgccgggggttcgctactgacaatattacctaaaggttgctcttctccctgcaacaacctttcaatggccgtggcaataccggggataaccattttctgatcgcgcagattataggtacgatcgcccacgaaggtattgttcagacgcatcacccctattttctgacgtcccagctcaataccatcgttttgcttgtccatcatggtggcggcgttgaccaccatatcaacatagacgggtggccctgaaacatagaatgttcctttacggttatcgccacgtagcgggtaatttttgttatataaacctgagcgttttagaaaattgttgaactcattgagtgagacgttgcgtaaagaaaccacggcattgcgcatttcactggcgtcataaatatagatagcctgcccatcgaaataccaaatcagccccagttgtagggaaagcttctccagtaatgcgttaggatcgtgaaactcaaagttgcccgtaattttttttcgtgccgccattttgctaacaatgacaggctcctttagctgtagcgccatggcatcgaaaaatgtccgcaggctatcgtctttcgcaacaaacccacttcccgttacaggtattttttcactagaataaccaggtgtaaccagaacaagcgcggcacatgccagcactctggccaaaagaatatgtgtcttcatttgtctgccaattgaataatatttgataatttccgcggcgaaacgccgatcagctctttgatctcactagaaaaatgtgaaggcgatgagtaaccatgattaacggctaattgggtgatgttctcgtggccttctacactattcagcagcgattgcgccatacgccagtttcgtaattcactcttcgcttttccgcccaacgctctgctgcacaaacgacgaaaatgggtataagaaacgccatagtcttctcccagcattctcatcgtgttgccgctggttgactgagcgagtaaatagccaaccaaccagtaactctcgctttttcgtaacagcgccagtaccttattgaaggccggagaaggcgtaataatttgctgcaaaaaccagtactcgcagcgtttacgatcttgccaaatagcgcgaaactcaggactcagcaaaacccatttatcggattcagcatatgtcgtgtccactaatcctgcgccatcgataaatgccagtaatttgctgagtacttcaatttttaacggtcgaaaaaccaggtctcctgatactggtgcgacaacggcctgctcgcaaaaaagcagcgcgccttcctgaatcaggcaattttcattgtgtcggctttcagaaaatgacatatgcagcttttgcgcggaacacgtctgtataaaccatgcttccgggctgcggattttccgcttctctccttctttaagtacttcctgcgtatttagcatagttgtcagcaccagttaaaaatcattttaatatgtaaacaataccgggagcgggtggcaaaatcctgatgcaatcattatgaaactgatgccgcccgctaattaaattggccaacttgcacagtgcttgctgatttaaaatagaaaattagctcatagtgtataaattctggcttattgttctgcagcagcaaaaattcagatattgtcatctggatggagaattaattatttatatcaggagttttttttgctagcattcctgaaacgcattcgcctcttatcactattgtcagataacattctgacggttgtgtaaaaacattgcgcctcattcttctgtagttggagttaatatgaaaaaattttatagctgtcttcctgtctttttactgatcggctgtgcccaggtgcccctcccttcctccgtgagcaaaccggtacagcaacctggcgctcagaaagagcaactggccaacgcaaatagtattgatgagtgtcagtctcttccgtatgtgccgtcagaccttgcgaagaataaatcattatcaaaccagaacgctgataattccgcatcaaaaaatagcgcaatcagctcaagcattttttgcgaaaaatataaacaaaccaaagagcaggcgctcaccttcttccaggaacatccacaatacatgcgttcgaaagaagatgaagagcaactcatgaccgaatttaaaaaagttcttcttgaacccggaagtaagaatttaagcatatatcagacgttacttgctgcccatgaaagactgcaatccttataaggccatatcaccgttggctgaactcatcatgatataattaagaccatattttgcattgccacttaatatcaatataattattatagctatggtcacttttacggttggccatttgtctcttacgttgcatttatcaatctgctttttgatacagcagcacctcgctgctgctttttttatttgtgataaagaactgcctcccaaactcgggaaaatagccgaaacttatactgacaaactatcgtctcgtatatcgcgataaactgacatccccctcttgccccacatgttggcattcttacgataccccatccacttttcgcggataacgttcttttgaacttacccagcaatagtggacacacaactaagtgagtaaacgctcaaacaagaggtgactcacatgacaaaaccagcatcaaccaccaataagccacgcaagcagcacacgcctgaaagccctgaaactggcggaacgcattggggtggccgctgccacccgcgagcttaacctgtataaatcacagatctacagctggcgaagcaaacagcaaactcagctctcttcttctgaacgtgagcagaagatgtccgccgcttagggttgtgtccctattacgcgggtaggatcaatcaagcagttacggcaaaaaagagaatcatgaatatatttagcaaactccctgatgatacgtaatcagtgagattaaagtaatgcaatcgcgataaaccgaagttaatcccctgtttaaagacagtgaacgaccttcttgccatgcctggactatatcagcctcatatgtacgccttgaaagcgtacatatatgtattataattgtacatattgttcataaacaggaggatgaaaaccatgcctcagatagctatagaatctaacgaaaggctgtcgttgcgtgtatcgacggatgccaaaaagttgatagtccgcgctgcggcaatccagcaaaccaacctgacggattttgtggtcagtaacgtactacctgtcgcacagaagattgttgatgccgccgaacgggtatatctgacggagcgcgatactcaaatgatcatggaaattttagataacccgccagcgccgaatgaaaagcttcttgccgctgctttcgccctgccggacatgaagaaatgatgtttacagactggcatgaggccgcgatagggaaaacccacaatcgaatgaattttgattgtggggatgccgatctgaaccaattcctgcaacgccatgcacgacaaaatcatgagaaagggacaacgaaaacctatgttgcgcttgataattcggatgttacacgtatccacggcttttactcagtcagtcctgcatcactgatatatgcacaggttcccggcgcaatcagcaaaggattagggagatacgatgtgccagtgtttcgtctgggtcgtttagccgtagacaaatctatgcaggggcaagggctgggagcacaacttttgttatctgccggaaagcgttgcatacaggcggctttgcaggtcggtggcgtagccctacttattgatgccaaaaataaacaggtctgcgactggtacaaaggatttggcgcagtaccattaaacgatcaacccctttccttgttgctgtcgtttaaaacgctttatgctgctttatctgcatctggtaggttatgacaacatgaggctttgttgaataattcagaatcggccaacgataaggatacaggactcccaccggagcactcgttatacgagcctgacgctggacggcattgccaacaacgtcatccggttcagcgctttgaccatcgccatcgcttcacccacctgcgcgtcatagttccgcaggctcagatggccgcccagcaaggttttgatacggaacatcgctgtttccactactgaacgacggtgatagcccactttcttttccagacctcattgctgccgctccgatgttgattttaaacttttgctttgccatcggaacccgatgctgaaacgacagtaacgattagatccgccaatctcctgaaagttctatttattcaacaaagccccttcgggatagagtttccgctgaatgggaaagtatgcctttgcaattaatcaataaagtgttgcgcaagaaatcgtgcatctttcaagcacatcgtctactttaattaaccaattcataaaatatatattctctgttcatttctagcttgtaggctattttaataactgtgtattttaaacaataaaaattaatattaccctacttctttgttataataccagcctccaaaattgtgctataagaacatcatggaattaatccgttatgctgacatcaacagcgatctctatcgccacatttgggtcgttggtgatattcatggatgttactccttattgttaaccagactggctcaattaaatttctctcctgataccgatctcttgatctccactggagataacattgatcgaggaaaagaaaaccttgaaacactgagactgttaaataccccatggtttatttctgtagtgggtaatcatgaagctatggcgcttgacgcttttgaaacacaggatggcaatttctggtatgtaaacggtggttactggtacgactcggtcaccgaaaaagacaggcaagaagccactgagctattactaacttttaagcagcgtcctcacatcatagaggttgaaacgtcctcaaagaagtacgtgattgcccatgccgattatccagatgacagctacgattatgggaagcaagttgatattgatagcgttctatggtcacgcgatcgtctgcttggttcgttacaggggaatatccatccaatacgcggtgcggatactttcatcttcggccatatgattgttgactacacaacaacattcgccaatcaaatctacattgacacaggttctttctgttcaggcaatctgtctttttttaaaataaagtaatctggaaatagaattatgtaatatacgcaacgatagcgttactttattttgtattctgaggatatatattcaaacatagaattctatcatagcatattaaccctccctgcattatgggcaatgatatagccttcaataagtaccattgcccattcgtaatagcgtctaaatttcgcgtttttctgcccatttcagcattaagatcgcaggccaaaaaaacgaagccgtaatccgacgcaggtagttacccgagcgcctgagacgagtaaagatcgcacatctcaagatacctatcggaagaaagcgcaataaccgtggtggcgaaatggatcggcttgccttcatgcaacacaatcttaataccggcggcggccgggatgaagttaatgctctgtgaatgccaggtgttttcggcgatatttgtccaggccgcgaatttgccattacagaagcgaataccttcacgactgatggtgactgccggctttgccgcgcttaaaaatgagcgagccaggcgcacaataaataacagactgccgcaacaaataagccccataaagacggcaccgccagttttgggctcctcgggatcggtggccatactcaccgccagcgcaataaaaactcccatcatacaaatccagaacacaataccaaccaacgttttagatctggaataatagatattgaactccacaggcatgttttgctggctggtttttgatacgtacagttccattgattcatccttgtataaaaatgtcgtcaggcgggtaaacgctgggaaagaaagttgagcagcagcggctcattgacgatagtggagcggtcgattttgcagatccggcccgtagcggtgctaatcatcagatagctcattgaactgccagccccctcctcgcgctgggtgcgaatactggcgatctgcgcatacggcaccgcccggtttttgtgttcaagccgatccgccagcgcggtcactttgccgaatttaagacgtccatcggcggcgaggcgcgcccccagcgcagaaccgtgtcgccggacaagttcagcagccagtcggtcgtaaattccgttgccatcgttccagaaatcaaggtagatgacgtacttcttgccgccactgtggcgcaagatgagtttgtcggattggtggagcagacgcattgattcaagcgcatcgtaatggataacacgatgcccggcctgcaacgcggtttcggttaacgtcatcctgcgcggcgtaaacagaaacagaactgtgacgctgaatttccagatgataaacaacaggcccaccagtagcgatataccggaaagccgataattcacggtggctgttgctatgctgagaataaaaaaaccgatcccgatagcaaaccatttcagctccgaaagcgaaagatgccgggtgtattgacgactttccatgatggtatggtatccctgattttactgtcggcgtattacgtcaggttgagtaaggaagctatatccgttatgttttaggttatatacacttcatccttcaggctgccggagcaactattgtacgctcccggagattaatgagagacatcctgcctctcaccgaagaccaaccacgagcctatacaccattcggtgtaaatgcctttctcagaagtgaacgtccaggcggctaccgaacccgagcgtgataataaagcgactcgttgtcatgagccagtcccttagcgacattgtccattttcggatgtcggcctgaattgccagtcacacgacctttttcactgactcgtccgtcggaaacaccgtacgcttttgatagcatgttggttatctatgccggaaatgcgggtctggtttttcttcagcagacgatcgaacgggctgagatcttcaggtattttgagattttggccagtgcattagccagagcctgcaactgtttttcgtccataaagcaaccagcttttaatgttgaatcgaacatatcaaaatcaggcaattacacaattttaattacagtctcattttgagttcggaagcatccgctcccctcttaattttgttgggatttctctttgttgcgagcatggtctgaactaattgcctggctacttgccttgtttcgtcaatatttggaaaatcgaacacatttccaacttttactttcaagacagaacttggcttcctaccctcactgacattacgatctgacgaggctactcttcgctggattacgtaggtttttttcgtcaaactggcttttaccccgaaaccagcaggagcttctctgtggtcatcgaaaacaatgtagagtttttgagctgggttagcttcgaaaacgatttttccagagcgactgagtgcagacttaacattgatacttaacttgttgataatgaaaggctggctgagagttgttttcaaagtatcacccctgttgtagtccaggaatgatgagaatgtaacctgtcacattttaggctacaggtgagctacaaatttatgggtttatgtgagtttataagggttttacctggggccacatgagcacttgaaagaataaaaaaacgagtaaaatcaatatgaatgagtcatttgataaggacttctccaaccacacccccatgatgcagcagtatctcaagctgaaagcccagcatccggagatcctgctcttttatcgtatgggagacttttacgagctgttttatgacgacgcaaagcgtgcgtcgcagttgctcgatatttcgctgaccaaacgcggcgcatcggctggcgaacctatccctatggcgggtatcccgcaccacgccgtagaaaactacctcgcgaaactggtcaatcagggcgaatccgtcgctatttgcgaacagattggcgatccggccaccagcaaaggtcccgttgaacgtaaggtcgtgcgtatcgttacgcctggcactatcagcgatgaagccctgttacaggagcgtcaggataacctgctggcggctatctggcaggatggtaaaggctacggttacgccacgctggatatcagctccgggcgctttcgtctgagcgaacccgccgaccgtgaaacgatggccgcagagctgcagcgcaccaatcccgccgaactgttgtatgccgaagattttgctgaaatggcgttaatagagggacgccggggtctgcgccgtcgcccgttgtgggagtttgagattgataccgcccgccagcagttaaatctgcaattcggtacgcgggatctggtcggtttcggcgtcgaaaatgcctcgcgtggattatgtgcggcaggctgcctgttacagtacgtaaaagatacccagcgcacctccctgccgcatattcgttccattacgatggaacgccagcaggacagcatcattatggatgccgcgacccgccgcaatctggaaattacccagaacctggccggcggtgtcgaaaataccctcgccgcggtgcttgactgtaccgtgacgcctatgggtagccgaatgcttaaacgctggctgcatatgccggtacgaaataccgacatattacgtgaacgccagcagaccatcggcgccttgcaggacaccgtcagcgaactgcaaccggtgctgcgtcaggtcggcgatctggagcgtatccttgcgcgtctggcgctgcgcaccgcgcgtccgcgcgatctcgcccgaatgcgtcacgccttccagcagctgccggaattgcacgctcagcttgaaaccgttgacagcgcgccggtacaggcgttgcgtaaaaaaatgggcgatttcgccgagctgcgcgacctcctggaacgcgccattattgacgcgccgccggtactggtccgcgacggcggcgttattgcgcccggctaccatgaagagctggacgaatggcgcgcgctggcggatggcgccaccgattatctcgatcgtctggaaattcgcgaacgcgagcgtaccgggctggatacgctgaaagtcggctataacgcggtacatggttattacattcagattagccgtggtcaaagccatctggcgcccatcaattatgtgcgtcgccagacgctgaaaaatgccgaacgctacattattcctgagctaaaagagtatgaagataaagttctgacctcgaaaggcaaagcgctggcgctggaaaaacagctatatgacgaattgtttgatctgctgttgccgcatctggccgatttacagcagagcgccaacgcgctggcggaactggatgtgctggttaacctggccgaacgcgcctggacgctgaattacacctgcccgacatttaccgataaacccggtatccgtattaccgaaggtcgccacccggtggttgaacaggtactgaatgagccgtttatcgctaacccgctcaatctgtcgccgcagcgccggatgttgatcattaccggccccaatatgggcggtaaaagtacctatatgcgacaaacggcattgatcgccctgctggcctatattggcagttacgttccggcgcaaaacgtggaaatcggccccatcgaccgtatttttacccgcgtcggcgcagcggacgacctggcttccgggcgttcgacctttatggtggagatgaccgaaaccgcgaacattctgcataatgccacggaaaacagtctggtattgatggatgaaatcgggcgcggtacctctacgtatgacgggctgtcgttggcctgggcctgcgcggagaatctcgcgaataagattaaagcgttaacgctgttcgctacccactacttcgagctgacccaattaccggagaaaatggaaggcgtggcgaacgtccacctggatgcgctggaacacggcgatactatcgcgtttatgcacagcgtgcaggacggcgcggcaagtaagagctatggcctggcggtcgcggcgcttgcgggcgtccctaaagaagtcatcaaacgcgcgcgccaaaaactccgcgagctggagagcatctcgcccaatgcggcggcaacgcaggtggacggcacgcaaatgtcgttgcttgccgccccggaggagacatcgcctgccgttgaagcgctggagaatctcgatccggactccctgacgccacgccaggcgctggagtggatctatcggctgaaaagtctggtgtaaacgtgtcgggcccgatagcgccgcgttatcgggcccacgcgccggcacaggcttttcaggctgtggctgtcgtttcatgtaaatgacgccagactatccgtcctctttccctttttaaaatgaccgtcgaccagcgtaccgtctcagcctggcccggcagttgctgtcgctcgcgataacgcagcgcggcgccttccggccactccgccacaaggtcaatgtgctcaaccacgataaccatccccgggcgacacgcgcgctgcgcctggaaaaaagcgcccagcgccggataatccagacaaatacctcctggcgttatcatcgtaaaatcaacagcgaaacgcgctatcaacgcctccaggctacccatccccttactaagccagttctcaatcgccgcatgggcgtgaataatttcttctttatatggattcatggtctttcctttttcaggcacagaagcgcctgtctattgttcagacagacagcgtaaataaggggcagcagggtgataccggcggcggcaataaaggtccagcgataagcaacctcaagcgacataacgcgctggaacgcatttaacagcagcgtcaacagcgtcgcgccaaggaaaaagctgatctgacgattaagattccatagcgcgctggcgtcaggcatgtcccggcgagcaatagtcaggaaagcgccactctgcgcggtactgctgcacaaactgccgccagcgcccattaaggcgaatatcatcatcagtacacggtgcgatgtcgcaggcgtaacgttagttaaaagcaatatccctgcggcctgaagaagacagccgacgataatcagcggacgcggcccaagccgattgaaataacgtccggtaagcataatggcgacaaatgaagcgatcgaccaggggagcatcagcgaccccgccgccgcaggcgatagctgcgcgacgttctgtagataaaacatcccgaccacgctgataccaatgaacatacccggcacacacagatagacgatcatggcaaaacgcagcagcttgtccgtcaacaacggcagatggagcaatcttgctgacaccattgtcgtcgaagcgacgttcagccaacgataagcgagcaataaagtgagaacggccaccggcagcgtggcaaagaatatccagcgccagccgcacgtttccaccagcagcccgccaatcgcaggcgaacatgccggcgccagtagcgccaccatcatgacaaccgatgacacgccagcgcgttcatgcggtttaaactgttgccaggttaacgcctgaccaaccgggatcaataagccaccgcccgccccctgcacaatacgccagaaaacaaggctgtgtaaggaatcggcaaaacctgcggcagcggcggcaacgctaaacagaatgagcgaaaatataatcagccgtcgtgcgccgagataacgcgaaagaaacgcgctaaacggaacgatcagcgttaatcctgcgatataaccgttactcacccatgccagcgccgatatggacgtatgcagctccacggacatcgcaggaaaagccacgctggcaataaacagattaatcagatcaagaaagaagccgagcaggtaaaccactgccactttactgcgatacgtcattatgcatcctccgtcagaggcgctaatgtagccgtccggagaaagccagataagtccgcgcttcaacgatatactgtcaaaataattttgacagtaaaggagctcgccatgctcaatttgcagcgtatgtcgctgtttatcgccgtggtagatagcggcagcttcacggcggcggcggccgcatcgggccaaacaaaagcggtagtgagttttaatattcggcagcttgaaaaagagcttggcgtaacgttactgctacgttccacccgacgactgacgctcacagacgccggcgtcctcttttaccaaaaaggcgtgaatttactcaacgcagcgaaaaatttgcaggatgaagtgcgtgccagccatagtgggctgggcggcgagttacgtattaccactacgcccgagtttggcgaacaggtgatcattccgttactggcgcagtttagtcagcgccatcccgatctccgtattcggcatatgtcctcatcacatcatgccgatttaattgccgagcgctttgatgtggcgattcggcttggctcgctggccgactcccgctatcgcgccgcgctgatatcccgctttaccattctgccggtcgccgcgccgcagtggctcgcccgccaccccgtgtcgtcgctggagtcgttggctcaggcggaatggattattcatgagcgattacctacgccgctacggtggtcagtaacgaataatcatggccaacactcacgcctggagataagcaaagccggcaaaatttctgtcgacagcgcgcgctcgctgatggccttcgctctcgcgggaagcggcgtcgcattactgccgcaatggttagtcaacaccgcactggaggatggaacgttaattcacgtgttacccgactatcattttccccgtcagggcatttatgccgtttacccggacgcccgccatgtaacgacaaaagtacgcgcatttattgattttttacgttcgcaatgggattgcggggagcacgccccatcattgtagccagcccgggagcattgcgctcccggacggataataccgtcttaatccttaactaccagcttgtctttgatcccctgcgcctgccaacgcacccacagcataattgccgccagaacgacaatcggcagtaacggatcgagccaactgccgccggaaccgaacagcaggttaatcagcgccacgccggtgccgccaatcgcccaggcaatagtcgtcggtacagaccaaaccaccatctgctgtttgacatcagagacgcccatcatgcggttaaccacccagaacaggctatcgttgaagtagccgaagaacagcgaccccatcgttgcggcctgagcggcaagcaacatattgatgccggggatctgcgccaggatcggcgcggaaatcgaggcggcagtgatcatcgccaccgtccccgatccctgaatcaggcgtaccaacgtcgccacgataaacgggatcaggatcggcgagatcggcaggttggcaacctgctccgccagctgttgccccgcgccgctgtcgcgcaggatcgcgcccaacgcgccgccagcgcccgtgaccagtaagataatcccggcgctttgcaagccctcttccagacgctctgcggtggtatgtttatccatgcgcggcaccagcgtatacaccgccagcagaacgctgatggccaacgcgatcactggacttcccacaaagttgattgcctgtaccaccggatgcgtcgccaggccggaccatccttctacagtggcgagggtggaacagatagccttcaggaagatcagcacgatcggcaccacaataggcagcagagagagcgtcaggctcggcagatccttttgctctttctctttattgtactgctccagcgcggcattgacttcatcggcgttcagcgtgcgcggcacgaaatcagggtagcgtttatccagccactgcgcatagaacacaatgccgatcacacagggcaccgccagcgccatcccggtcaataacattgcgccgatgtcgacgttaaaaatcccggctacccccagcggaccgggcgtcggaggtaccgtatggtgagtgaccaccagcccgcccgccagcgcgacgcccagcgtcagtagcgaacgtttaccgcttttcgccagcgctttcgccaccggataaagaatgacaaaagcggaatcgacgaaaatggggatgctgacaatataacccgtgatcgccagcgcccactcttcacggcgtttccccagccatttgataaagctccaggcgatacgctccgccgcgccggaaacctccagcaagcgccccatcattacgccgagaccaatcaccaggccaatgctgcccagcgtcgtaccgaatccgctggtgatgacagagagcgttttatcaatgcccattccccccaacagaccggcgatgcaggccgccgccagcatcgcgatcagcgcatgaacacgggtgcgtaacaccagccataccagcacgaaaacggcaacgatcaggccaataattggggtcggtaaacttgtcatgacctcccctccatatcatcttgtcgaaagcgttcaataatgtcatcgaagcgtttatcggcgacaaaacctaacgccagcgcacgctggttatcgatacgtcccggccaggaggcgacaattttctcgacgccttcatcgcgctgatgcgtaacccgatcgcgcgccgcctggccgcccgcctgacgcaacgtttccagcatctcgcccacggttacgctgatcccgggtaagttgatgctgctcgcctcgccaggcgcgggtaacgttgcggccagcgacaggttatggatcaccgtcgccgggctggaaatccacagccgcaaactttccgacaccgggcagacggtcgtctcgccctgcaacggttcacgaataatcgcgctgacaaaagaagaagcggcgcggtttggtttacccgggcgaacacagatcgtcggcaaacgcagcgccagcccatccacatagcctttgcgggtataatcgttgaccaacagttcacaggcggctttctgcgcgccataagacgagcgcggcgtgagcgcggtggtatcggtgacgcattccggcagcgtaccgccataaacggcaagcgagctggagaagacaaaacgaattttctgcggttgtcgacgacacgtctcaagtaactggcgtgtaagatccaggttaactttccatcccagatcgaaatcgtcttccgcatggctgctgacaatcgcagcgagatgataaacaacagaggtattagcggtaatcacattctccagcacgcccggctgggttaagtcagcttccaggcagcgtaaacgaggggaatctgataaccgtgcaggcatttttaaatcaacaagaagcagttcgttaaacgccagcgatgagtttaataaggcgcttgcgagtttctggcctaaaaagccgcccccgccggtaatgataatctgcatccggatgtcctctttattgttgtgtagggtagttcagggttagcgccaggcgttaaaccagccaagcccgtcctgagtggtattccgtggttggtattcgcagcctatccagccgcgataacctacgtcatcgaacagccggaacagccacgggtagttgatctcgccatcatccggttcatgtctgtccggtagcgaggcgatttgtacatgggcatagcggcccgcgtactcgcgaatcaggtgactcaaattgccatccactttttgcgcgtggaaagtgtcgagctggatgaacacattcgggcggtcaacctcttctgcgatgcccagcgcctgatattggctggaaaagaggtagccgggtttaacgccgggactcagcgcttcgatcaaaatacgtttatcgtgggcggcaaaccggtcggcggcataacgcaaattatcgataaacgtggcgcgataacgtgcgccatcagcgccatcctgcactacgcccgccatgatgtgaacctgctcgcattccagcgccagagcgtattccagagccagttcaatatcggcgcgcgcgtcgtgttcgcgccccggtagcgcggcacgtccccactcgcccgccgcggtatcgcccgccgaagtattaaacagcgccagcgtcagatcatgacgcgatagctgggctttaatctcgctggcggcaaagccgtaggggaacagaaactcaacggcctgaaaaccggcttcggcagcggcggcaaaacgctcgataaacggcacttcggtaaacatcatcgacaaattggcggcaaaacgcggcatcgggttatctccttaactgcgtaatttcttcggtggttaaataacgaatcgggcgttcgccaaggataaaaatcagctttgccgtctcttccagctcctcggtattattagcggcttcctgcaaattctccccgcacacgaccggcccatgattagccagtaaaaaggcctgatgccgggccgccagcgcagccaaatcgcgggcaattcggtcatcccccgggcgatagtagggaaccagcggaatgtcgcccatccgcatcaccacatagggggtaaacgggcgaatcacattttgcgggtccagcccttcgagacaggaaagcgccgttgaccaggtgctgtgcagatgtaccacggccttgcagcaagggttattgcgatacaacgccagatgaaaacgcacctctttagacggtttatcgccgctgagccattcgccctgcgggtccactttggatagccgctgcgggtcgagattacccagacacgaaccggtgggcgtcgccagaatattgccgtccggcagtaacagcgagaggttgcctgccgagccggtggcatagccgcgctggaaaaacgaggcggctatcctgaccatctcttctcgcaaagcgtgctcttcttttgccagtgtcgtcatacctgaaactccctttgagcgcggatgaaaaaggattcatcgccaaaattacctgactttagcgccagcgagactggcgcatggagcgcgttgacccacggcacgccgggtgaaatgcacggtccgatgtgaaaaccggtaataccgaggctttgcgtcaccacgcccgaggtttcgccgcccgccacaataaaccgggtgataccgccttccgctaagcgagcagccagcagggaaaagagcgcctctaccgcatggctggcttcggtagcgccatattgctgctggatggcggccagcgcctgcgtggaggcggtggcgctaatcattggcgccagttcgctgtcctgactgagcacccactgcgccagcgcttcagcgtaggcctcgcgcgtctcggatgacaggcagcgcgccacatcaacgtcgcgtgtgggagcatgttgtcgatagaaagccacctgctgattcgtcatttgcgaacaggaaccggaaagcaccaccgcgcggccgctcagcggatagcctgcggaacgggcctgagaaacgccgtgcttcgcccactgacgcgccagccccattgccagcccagaaccgccggtcaccagcggagcatcacgcaaaacctcgccctggatttccaggtgccgctcattgagcgcgtcaagtactgcgtagcgatatccttcctgctgtaaacgcgacagcgccgcacgggtcgcggcaacgccttcatcaagcgtctgagccggaataacgccgcagcgcccttgcgcctgcgcttccatcagacgcggcaggtagctgtcggtcatcggattgattgggtggtggcgcataccggactccgccagcaagtggttcatgacaaacagatagccctgataaaccgtgcgtccgttaaccggcagcgcgggagaaatcacggtaaatgaggtatccagcgccaccatcagcgcatcggtgaccgggccgatattgccttcggcggtactatcgaaagtcgagcaatatttgaaatagacttgctggcagccctgttttttcagccataccagcgccgccagcgattgttttatcgcctcttgcgccgggcatgagcgggttttcaggctgataaccaccgcgtcgcacccttccggttgcgtcccggttgggacatcattgatctgcactgtcggcatcccgttttcgaccagaaaactggcgatgtcagtcgcgccggtaaaatcgtcggcaatgacgccaatttttaacatgacggctcctcaggcgtgacgccaggcagagtaatccctgagaaaattttgatcacagcgctgtcatcctctttgccataaccggcgttactggcgctggtgaacatatttaacgccgtagaggccagcggtaaggggaagcgcagcgctttcgccgtgtcggcaaccagccccaaatctttgacaaaaatgtcgacggccgaacgcggggtatagtcgccgtcaacgacatgctgcatacggttttcgaacatccaggagttgccggcggcatgggtcacgacgtcatacatcacgtccagaggaataccagcccgcgcggccagcgccatcgcttcggccgccgccgcaatatgcacgccagccagcagctgatgaatgattttgacggttgagcctgcgcccggcgtatcgctgatgcgataaacgttgctggcaacggcgtccagcacaggcttcaggcgggtaaacgccgcctcgctcccggaggccatcaccgtcatttcgccctgcgccgcttttaccgcgccgccggaaaccggcgcatccagcatgttaagattcaatgccgtcaacgccgcggcgatctcttgcgcgtcggcgcttgagatcgtagacgaaaccatcaccgcgcttccgggtttcatcagatgggcgacgccatcctcaccgaataacacctgtctgacctgggcggcattgacgaccagaatgactaacgcatccacgacgccggcgaactccctggcgctggcggcagccccacaagccccttcagcgagcagattcgcgcacgcttgcgggttaagatcggccccccatgtggaaagcccggcgcgcaggcatgaacgcgcagcgcccattcccattgagccaagccccacaatgccgacatgaaaatcagttcctgttgtcattatcactccatgttaatttacgtgatattatgttttgttatgtgaatataggcgtttttgtaaacaattgcggtgagttgtttcacaaaaaataacaaaatatgttattttttgtgaaggcaatcctcatagaacttcacacgctgtgacgagaaatcgcgtaaaatcgcgacaggactaaagaaaggagcagacgttgatacctactgagcgtcgacaaatcattcttgatatggtggcggagaaaggaatcgtcagtatcgctgaactgaccgagcgcatgcatgtatcccacatgactatccgccgtgatttacaaaaactggagcagcaaggcgcggtaatccaggtctctggcggcgtgcaatcatcgactcgcgtggcgcacgaaccctcgcatcagatcaaaaccgaactggcgacgccgcagaaagcggcgattggcaaactggccgccagcctggtacagccagaaagctgtatctaccttgatgcaggtactaccacgctggcgatcgccaggcagctggttacgatgaataaacttacggtggtgaccaatgatttcgttatcgccgattacctgatggacaatagcgattgcacaattattcacactggcggggcggtatgccgggaaaaccggtcgtgcgtcggtgaagccgcggcgacgcttttgcgtgggttgatgattgaccaggcctttatttccgcctcttcctggagcgtgcgcggtatttcaacgccggcagaagataaagtcacggtgaaacgggccgtcgccagcgccagccgccaaaaaattctggtgtgcgacgcgaccaaatacggccaggtcgctacatggctggcgttaccgctggcggaattcaaccaaatcgtcaccgatgacggcctgccggaaagcgcaattcgggcgctggccaaagtggatatctcactgctgatggccaaacaatagcaaaacggcgcaagccgcttacgtcatcatcttgcgtaccagttgcgtaaactgttcgcgttcttcagcgctcagtcgccccaaaaactcatcgtcaacgcgatcccccagtggtatcgcggcggcgagcaacgtttggccctgaacggtgagatagacaaaacgccgacgtttatccagcggatcgttttctcgcttcaccagcccacgattttccatccggcttaacatctccgccagcgtcgctttagtgctgaccgccgcttcggtcagatcgacctgttcaatacccggatgttcagcaataacgcgcatcaccgcatattgaggtttggtgagctccggtagttcatgctgccagcgtgcggtatgttgctgaaaaagttggcgtaacagatgaaacgcggtgtttcgtaactccatgagcgctccggataaattaactttttctatcataacgacttatgcacggttttttaatgacgaatgctttagctaaacgtgcgcaggcgtcgggagcgatcttgtcgcaaaggccgtgtgggcgtattttgatcaaaatgttcgtatacgaacgatatttgaggtaagaaatgagattgattgtggggatgaccggtgcgaccggcgcgccgcttggcgtcgagctactccaggcattgcgggcgatacctgatgttgaaacgcatctggtaatgtcaaagtgggcgaaaaccactattgaactggagacgccctacacgcccgctgaggtagccgccctggcagattattgtcatagcccggccgatcaggcggcgaccatttcctccggctcatttcgtaccgacggcatgattattatcccctgcagtatgaaaacactggcgggggttcgcgccggctatgccgaggggctggtgggacgcgctgccgatgtcgtgttgaaagagggtcgcaagctggtgcttgtgccgcgggaaatgccgctcagcacgattcatctggaaaacatgctagcgctttctcgtatgggggtggcgatagtgccgcccatgcccgccttctacaacctgccgcaaaccgttgacgatattatccagcacatcgtagcgcgcgttctcgaccagtttggtctggagcatacgcgcacgcgccgctggcaaggactgcgacaggcagcaaatttttcacaggagaatggataatggcatttgatgatttgcgcagttttttacatgcgctggatcagcagggacaactgctgaaaatcagcgaggaagtgaatgcggagccggatctcgccgccgctgccaacgcaacgggacgcatcggcgatggcgcgcccgcgctgtggtttgacaatattcgtggttttaccgacgcccgcgtggcgatgaataccatcggttcctggcagaaccatgccatctcactgggtttgccgcctaacacgccggttaaaaaacagatcgatgaatttattcgccgctgggacaattttccggtagcgccggaacgacgggcgaatccgggctgggcggaaaataccgtcgacggcgacgcaatcaacctgtttgatatcctgccgctgtttcgtctgaacgacggcgacggcggattctatctggataaagcctgtgtggtatcacgcgatccgctcgatcccgataacttcggcaagcagaatgtcggcatctaccgcatggaagttaaaggcaagcgtaagctgggtctgcaaccagtgccgatgcatgatatcgcattgcacctgcacaaagctgaagagcgcggggaagatctgccgattgcgatcacgttgggtaacgatccgatcattaccctgatgggcgcaacgccgctgaaatacgatcagtcagagtatgaaatggcaggcgcgctgcgtgaaagcccctatcctatcgccaccgcgccgctgaccggttttgatgtgccgtggggatctgaagtcattcttgaaggggtcatcgaaagccgtaaacgtgaaattgaaggaccgttcggcgaatttaccggccactattccggcggtcgcaacatgaccgtggtgcgtatcgataaggtctcttaccgcagcaaacccatttttgaatcgctctatttggggatgccgtggacggaaatcgactacctgatggggccggcgacctgcgtgccactgtatcaacagctgaaagccgaatttccggaagtgcaggcggtaaacgccatgtacacccacggcttgctggccatcatctcgaccaaaaaacgctacggcggctttgcccgtgcggtgggcctgcgagcgatgacgacgccgcacggtctgggatatgtgaagatggtgatcatggtcgatgaagatgtcgatccattcaatctgccacaggtgatgtgggcgttgtcgtcgaaagtgaatccggcaggcgatctggtacagctaccgaatatgtccgtcctggaactggacccgggctcaagcccggcggggattaccgacaagctgatcattgacgccaccacgccggttgcgccagataaccgtggtcactatagccagccggttgttgatttaccggaaactaaagcctgggctgaaaagctgaccgccatgctggccaaccgtaaataaggagtaaccgatgatttgtccacgctgtgccgatgcacatattgaactcatggcgacttctccggtaaaaggagtctggacggtatatcagtgtcagcattgtctgtatacctggcgcgataccgaaccgttacgccgtaccagccgcgaacactatccacaagcgtttcgcatgacgcaaaaagatattgatgacgcgccaatggtgccgagtatcccgccgctgctggcagaagacaaacggtaaaaaaaaggccagtctgtcgactggcctttttttgacaagggtacttactcgcggaacagcgcttcgatattcagcccctgcgtctgcagaatttcgcgcagacggcgcaggccttcaacctgaatctgacgaacacgctcacgcgtaagaccgatttcacggcctacatcttccagtgtcgcagcttcatatcccagcagaccgaaacggcgcgccagcacttcacgctgtttggcgttcagttcgaacaaccatttgacgatgctctgtttcatatcgtcatcttgcgtggtgtcttccggaccgttctctttttcatcggccaggatgtccagcaacgctttttcggaatcaccgcccagcggggtgtctaccgaggtaatgcgctcgttgagacgaagcatacggctgacgtcatcaaccggtttatccagttgctctgcaatttcttccgcactcggttcgtggtccagtttatgcgacaactcacgtgcggtgcgcaggtatacgttcagctctttaacaatgtgaatcggcaagcgaatcgtacgggtttggttcataatcgcccgttcgattgtctggcgaatccaccaggttgcgtatgttgagaagcggaacccgcgttccgggtcaaacttctcgactgcacggataagccccagattgccctcttcaatcaggtccagcaacgccagtccacgattgccataacggcgggcaatttttaccaccagacgcaggttactctcaatcatgcgacggcgagaagcgacatctccacgcagtgcgcgacgcgcaaaatagacttcttcttcggctgttaacagtggtgaatacccaatctcaccaaggtaaagctgagtcgcgtccaacacacgctgtgtggccccttgcgataacagctcttcttcagccaggtcgttatcactgggttcctcttcactcaaggctttttcgtcaaaagcctctactccgttctcatcaaattccgcgtcttcatttaaatcatgaactttcagcgtattctgactcataaggtggctcctacccgtgatcccttgacggaactagcaagtcaaagcctggttccgccgctttatcgctgcggtaaataacgcagcgggtttacggatttccccttgtaacgaatttcaaaatgcaagcgtgtagagctggtgccggtgctacccatagtagcgattttttgccccgccttaacttcctgttgttcccggaccagcatcgtatcattatgggcgtaggcactcaggtaatcatcgttatgtttgatgataataagattaccgtaaccacgcagtgcgttaccggcatatacgacgcgcccatcagcggttgcgacgatagcctgtcccttactgcctgcaatgtcgatccctttattgcccccttcggaagcgccaaagttttcgatcactttgccatccgtcggccagcgccatgcggaaatcggcgcgctggttgacgtactgcttgcatttggttcggtcgtgcttaccgttggtgccgttacaggcgctgtgacaaccgtcccagcaggcttgttgtttggcaacattttgttagcactttgttcacctgagccctcagaatacgtaattgttggttgagacgcaactgcaacggtggaattttgtgcagacctggtcacaactccttgctgtgctgcatccgcctgggtgatcgcatttccgccagtaattggcgtaccggatgcgttaccaacttgcaaagtttgccctacattcaggctatacggggcagaaatactgtttctctgggccagatcgcggaaatcgttcccggtaatccaggcgatgtaaaaaagcgtatcaccctttttcacggtgtaagtactgccacccgtatagctacctttcggaatattcccatactggcgattgtatacaattcgcccattttccatctgcacgggttgttccgtgaccggttgagtttgcatgggctgcgttacaggacgctgaacgggttgaatttgcggcgcttgttgcggcgtttgttgcgtcgtcgcgcccatttttggcggcggtgtgatcaacatcccggaattggtatttgatgacgacccactgtccacagacgtgaccggcgccggagggtttgacgaactggtacaacctgccagccatagtgaaaccagtgatagtgccgcaatgcgactaacggtgaattttgggcttcccgcgctcatttatcccccagtaaaaaatttggttaacaaccagtgacgtaagaaccgtgcaacgcattaagtgaacacgggaaaatgtgttcacgatacgcttaacccaccgggaataaccaggaaaactccaggtattcgtttcggcttcatcaggcgtaagagtgggtgtttgcagggcaaactaggccagctctcccttgactaacgggacgaagcgaacggcctccacggtatcgataataaattcgccgccccggcgacgcacgcgtttcaaaaactgctgctcatcgcccacgggcagaacaagaatgccgccttcatccaactgtgccatgagcgcggtaggaatttccggtggcgcggccgtcacaatgatagcgtcaaacggcgcacgcgcctgccagccttgccagccatcgccatgacgggtagaaacattatgtaaatcgagctgcttcaggcggcggcgcgcctgccattgcagccccttaatccgctcaacggagcaaacgtgatgtaccagatgcgccagaatcgccgtctgatagccggaaccggtgccaatttccaacaccctggattgcggcgtcagttcgagcagttccgtcattcgcgccaccatgtagggctgcgaaatcgtctgaccctggcctatcggcaaagcgatattttcccaggccttatgttcaaacgcttcatcaataaatttctcgcgcggcactgcggcaagcgcattaagcacctgctcatctctgatgccctgcgcgcgcaattgttcaagaagagcctgtacacgtccacttaccattgcgtgccaactcccacgctgtctaaccagtctgaaaccacatcatgcgcgctgtgcgcggttaaatccacatgcaacggcgtgacggagacgtagccttcatccaccgccgcgaaatcggtatccggcccggcatcgtatttatcgcccggcgggccaatccagtacaatgtattaccgcgcggatcttcctgcgggattactttatccgctggatggcggctaccacagcgagtcacgcggatgcctttaacctgcgctaacggtagatccgggacattcacgttgagaatacgcccggtacgcaacggctcccggcttaaccctcgcaaaagcgcgcaagtcacggccgcagccgtatcataatgttgatagccgttaagggagaccgctaatgccggaaagccgagatgacgaccttccatcgccgcggcgacagtaccggaatagatcacatcatcgcccagattcggacccgcgttaataccggaaacgacaatatccggacgcggacgcattaaggcattaacgcccagatagacgcaatcggtcggcgtccccatctgtacggcgatatcgccattatcaaaggtaaaagtacgaagcgaagattccagcgtgagggaattagacgcgccgctgcggttacgatccggggctacgacctgtacatcagcaaactcacgcagcgctttcgccagcgtttgtataccgggcgcgtgaaccccgtcatcgttactcagcaatatgcgcataatcacccattgtgttgatcagttcccttactacgctggtggcaaaactgcctgcgggcagccagaaacgtaactcgacggtaacgtcatcccaccagttccagcttaattgttgcggataaagcagcatcgctctgcgcgacgcctctactttttcgcgcagcaacagcgattgcaacaccgtttcctgggcaatggcatcttgctcaaacgccagcgccgcacgctgtgttccccactctccgctgcccggcaacgacgctgtaatcatcagctctttttcgtctacccggcgctgcaattcaggcagttcttcagatgtcgcgacgaaccagcttccacgccccgctaattgtagcgcatcgccgtcaacaacttgattaaagtctggtttcttcagccgctggtgaacaatttgattaaacaacgcgctacgcgccgccgacaaccaaaaactgcgtttattgcgatcgcgcaccggcgcgttactttgcgcccagcgcagcgcgccctgcaagttgctgccgccaatgccgaatcgctgtgcgccgaaatagttcggcacgccgccatcgcgaatcgcctgcaatcgtgtttcgacatcgcggcgatcgcttatttcacgcaacaccagcgtaaaggcattgcctttcagcgcgcctaaacgcagcttacgcttgtgacgcgcgtattccagcactttacaaccttccagctgaaaggcgctgaaatcgggcatctctttccccggcacgcgcgcgcacagccactgctcggtaacggcgtgtttatctttttgcccggcaaagctcacttcgcgagcgtgaattttcaggaatttcgccagcgcgtcagcgacaaaacgggtattgcaaccgtttttcaaaatacgcagcagaatgtgctcgccttcaccatctggcgtaaagcctaaatcttcaaccaccacaaaatcttccggattcgctttcagcaatccgctaccttgtggttttccgtgcagccaggtgagattgtcaaactctgtcatttcgccgccttcatcagcaacgcgaccgcttcgcaggcaatgccttctccgcgtccggtaaatccgagcttttccgtcgtcgtcgccttcacgttaacatcatccatatggcagccgagatcttcggcgataaagacgcgcatttgcggaatatgcggcagcattttcggcgcctgcgcaataatggtgacatctacgttgccgagggtgtaccccttcgcctgaatacgacgccaggcttcacgcagtagttcgcggctatccgctcccttaaatgccggatcggtatccgggaagagcttgccgatatcgccaagcgccgccgcacccagcagcgcatcggtcagcgcatgtaacgccacatcgccatcggaatgcgccaatagccctttttcataagagatacgcacgccgccaataataatcggcccttctccgccaaacgcgtgtacgtcaaaaccgtgtccaattcgcattatgctttctcctggtggatggttcgggtcagataaaattccgccagcgccagatcttccggacgggtgaccttgatgttatccgcgcgaccttctaccagcgccggatgaaaaccacaatattccagcgctgacgcttcgtcggtgatggtcgcgccttcattcagcgcacgcgtcagacaatcgtgcaagagttcgcgggggaaaaactgcggggtgagcgcgtgccataaatcggcgcgctctacggtatgggcaatagcgttcttccccggttcgccgcgtttcatggtgtcgcgcaccggactggcgaggataccgccgacccggctgttttcgctgatggtcagcaaccgcgcaaggtcatcctgatgcaaacagggtcttgccgcgtcgtgcaccagcacccactgcgcctttgcaacggcctgcaacccggccaaaacagaatcagcgcgttcgttgccgccatccacaacggtgatttgcggatgattcgccagcggaagttgggcaaagcgatgatcgccagggctgatagcaataacaacgcgtgtcacccgaggatgcgccagcagcgcatgaactgagtgctccagaatggttttattaccgattgagagatactgcttaggacattctgtttgcattcggcggccaaatccggccgccggcaccacggcgcaaacgtccaataaagtggctgccatgttaaatccctggatggtttatcgatgagtttgccccgccgttgccgcgcgttttgaggcgtcaggcaccagacgatagaaggtttcgcccggtttggtcatgctaagttcgttgcgcgcgcgctcctcaatcgcttcctggccgccattgagatcgtcaatttcggcaaaaagctgatcgttacgcgctttaagtttggcgtttgtcgcctgctgcgcgaccacatcatcgttgacgcggctatagtcatgtatgccgttcttaccgaaccacagcgagtactgtagccagaccagtaaagccagcaacagcagcgttagtttacccatcctgccccctgaaaaacggcatcatcatcccataacgtcctctgtgactccacattcaggacgggattgccgcgacaacgccggcaaatgtaccacatttgccggatgttacgtatacccgagtaaggagaacataatctcattgttggttacggtttgaattatgaccggaggcgcagtgataacccgtctaccctaatagccatataaataacgcgccgaacagcgcgcctacggccagtagagtaaacataatgctaaaaagtattttgccctttaccagcagatgcaacgcaatgccgataatcaccgataccggcattaacgcgaggaaaaagggccaggtatagaggaaaaaaaacagcgtgttagggccataaagcagaaaagggatccccaacgccagcagccatgacacaaagccgaccaccgcccccggaaatgcactggtggcgtcatcgtcgaccatgaaggcgtctgaccttgtgaaagtaatgttatggctattacgcatattaaatcctgtaaccttgaccataccgggcatacaagcccggtggtgtctcaggatctgataatatcgcgccgtctcagcaggtctaataattgggaaaccaaatttgttactaattgttcaccattaagatgaacctgtggcgagtcaggcgcttcgtaaatggcgtcgatgccggtaaagttacgcaactcgcccgcacgcgcttttttatacaaccctttaggatcgcgctgttcacagatagccagcggcgtattgacataaatctcgataaaacgatcgtggccgacgcgctcttttaccagttgccgctcggcgcggtgcggagaaataaatgccgtcaaaacaatcaggccggcgtccgccatcaggctggccacttcgcctacccgccggatattctcctggcgatcggcatcgctaaagcctaaatcacggcacaaaccgtggcgcacattatcgccatccaacaggtaggtactgacgccacgctgatgtaacgcctcttccagcgcgccggccaccgttgattttcccgaaccggagagtccggtaaaccacagcaccacgccacggtggccgtggagctgttcacgggcggcgacagtaacgggatgagagtgccagaccacgttctcatcatgcagcgccatgtttatctcccagcaaatctcgggcgtcccagtgcggaaaatgacggcgtaccagcgcattcagctccagctcaaacgcactgtattccacgggcggcgtcgctccgcgttcgtccagttcccgcaccatgccagcgcccacggtaacgttagaaagtcggtcgataaaaatcagcccgcccgtcaccggattttgctgataaatatccagcgcgagcggctcatcgaatgtcatctccaccagaccaataccgtttaacggcaggctctcgacgtctcgttgggtcagattgttgatatcaatctgatagcgaatagcctcgatacgcgcgcgggttttcttacccgcaagtttaacgtcgtagctttggcccggcgccagcggctgttccgccatccataccacgtcgatcgcggcgtgccgcgcaggtgccagcgtctcgtttgccgccagcagcagatcgccgcggctaatatcaatgtcgtcgttgagtaccagggtaatggcttcgcccgcacaggcttcttctttatcgccatcaaaagtgacgatacgcgccacgctggattccacgccggacggcagcactttaatgcgctctccgactttgacgctaccagacgccagagtgccggcatacccccgaaaatcaagattcgggcgattaacgtattgtaccggaaagcgcatcggctgacggtctaccgcacgctgtatgtctaccgtttccaggacttccagcagcgtcggaccgctgtaccagcgcatattcgcgctctgcgcggcgacattatccccttccagcgccgaaagcgggacaaagcgaatgtccaaatcgcccggcaactgttcagcaaaggtcaggtaatcttcgcgaatacgggcgaaggtctcttcgcagtagtcaacgagatccattttgttgattgccaccaccaggtgtttgatccccaacagagtggagataaagctatggcgacgcgtctgatccagcacgcctttacgcgcgtcgatcagtaggatcgccagatcgcaggtggacgccccggtcgccatattacgggtatattgttcatggcccggcgtgtcggcgataataaattttcgtttttccgtggagaaatagcggtacgcgacgtcaatagtaatgccctgctcacgctcggcctgcagcccatctaccagcagcgccagatcgagtttttctccctgcgtgccatgacgtttactgtcattatgcagagaagagagctgatcttcataaatttgcagagtatcgtgcagcaaacgacctatcagcgtacttttaccgtcatcaacgctgccacaggttaaaaaacgcagcaggcttttgtgctgttgggcaatcatccaggcttcgacgccgccttcattggcgatttgttgtgcaagtatggtgttcatggcggctccttagaaatacccctgacgttttttaagctccatcgaccccgcctgatcgcggtcaatcatcctcccctggcgctcgctggtggtagaaaccagcatctcttcgataatttccggcagcgtttgcgcgtgggattccaccgccccggtgagcggccaacagccaagtgtacggaagcgcaccatcctttttttgatgacttcgccaggctggagatcgatacgatcgtcatccaccatcatcaacatgccgtcacgttccagaaccgggcgttcagcagccaaatacagcggcacgatgtcgatgttttccagccagatgtattgccagatatcctgctctgtccagttggagagcgggaagacgcgtatactttcacctttattaatctgaccgttatagttacgccacaactctggacgctgatttttcgggtcccagcgatggaaacggtcacgaaaggagtaaatacgttctttcgcacgggatttttcctcatcgcgccgtgcgccgccgaacgcggcatcaaaaccgtacttattcagcgcctgctttaacccttcggttttcataatgtcggtgtgtttagcgctaccgtgaacgaacggattgatgcccatcgccacgccttccggatttttatgtaccagcaactcgcagccatatgcgttggcggtacgatcgcgaaaggcgtacatctcacggaatttccaaccggtatcaacgtgcaatagcgggaacggcaacgtacccggataaaacgccttacgcgccagatgcagcatgacgctggagtctttaccaatggagtacagcatgaccggattagcgaattccgctgccacttcacggataatgtggatactttccgcctccagttgccgcaggtgggtgagtcgtttttgatccataaccgttcctttgcaataccgttttttgctaaacatttcgattacacgactatagggagcgcaggagagtgaatgaaatgacgaattggaatgagtagttcctcaaaggaataacgcggcccaaaaaccaatatcaaaaaatgcttaacgtaccggattgccagcatttaggagcaaatgaaattgtattaacacgatcgcggtttcatactagccacgtaaaattttgttctgtatttaaggactcattatgttttccgcaacgcgccgctttgccgtcattctggcgctcggcgtaggctttatccttcctgcacaagcagcatcaccagggcctggtgaaatagcgaatactcaggcacgacatatcgccaccttttttcccgggagaatgactggctcccccgccgagatgttgtctgccgattatttacgccaacaatttacccagatgggatatcaaagcgatattcgaacgtttaatagccgatttatttataccacgaaggataatcgcaaaaactggcataacgtgacgggcagtacggtcatcgccgcccatgaagggcgcgtgccgcaacagatcatcattatggcgcatctggatacgtacgctccgcagagcgacgctgatgtcgatgccaatctgggcggtttaacgttacagggaatggatgataatgccgcgggattaggcgttatgctggaactggcggcgcgtctgaaagatataccgacccattacgggattcgttttatcgccaccagcggggaagaagagggaaagctaggcgcggaaaatttactcaaacgaatgagtgacgctgagaagaaaaatacgctgctggtgattaatctcgataacctgattgttggcgacaagctctattttaatagcgggaaaaatacgccggaagcggtgcgtacactgacccgcgatcgggcattagcgattgcgcgccgttatggtatcgccgccaacaccaatccgggacgcaatccatcctaccccaaaggaacgggttgctgtaatgatgcggaggttttcgataaagcgggaatatcggtgctttctgttgaggcgacgaactggaatctgggtaaaaaagacggataccagcaacgcgtgaaaaatgcctccttcccgaacggcaatagctggcacgacgtacggcttgataatcaacagcatattgacaaggcgctgccagggcgaattgagcgccgtagccgcgatgtagtacggataatgctgccgttggtaaaagagctggcgaaggcggaaaaaacgtcctgatatgctggtgaaacgtgtttatccccgctgacgcggggaacactatttataagcgtgtcatctatgcaacccaaccggtttatccccgctggcgcggggaacacacctgcccgacccaataagggggccctcgtgacggtttatccccgctggcgcggggaacacggccgctggtcaaattcccaatctgagcaatccggtttatccccgctggcgcggggaacacatagccccggcagcgatagctaaaccagttcccggtttatccccgctggcgcggggaacacgcctcaaaatctctcggtgagatgtaagcgtccggtttatccccgctggcgcggggaacacaccagtggtcagcggcggatgaatttgccctgcggtttatccccgctggcgcggggaacacgagaatgctcatgcgcgtgagcgccatatattcggtttatccccgctggcgcggggaacacaggcggaccgaaaaaccgttttcagccaacgtcggtttatccccgctggcgcggggaacacactaaaactatatatttgttctaaaagcccttttttactacataacaaactaccaacggtaagataacaattccttatcattaaagaacattcaacttattgattttcaacaggaagaaaagaaaccaaacgcagtccatccaaatctaccggaatacgtctgttttcaccccaggtctggaactcaaaaccagactcagtatttgttgcccaggccattactacgtttccgactccgccaagctgtgtgatctgttgccaaatcatttcccgaatacgcttcgaggtatcgccaacataaacacctgcacgaacctcaagtaaccagacggcaagacgtccccgcaggcgcggcggtacgttttccgtgaccacaaccaccatactcatcaaccatgcccccgatggccgctatcacccagtgattcaggttccggtattgctggcggcagcatatccggcgcaggctgaggtggttcaatttcaccggcagcgagcacctcttcgatcagcgggatcaattttccggtcagcttcgaactgcgaaaaatatcccggcaggccaggcgcacttctttatcaggttccgccgggtgacgagcggcgatctcaaatgctttgggcaccaccgattcaaatttgatgatatcggcaatgtcataaacaaaagaaagcggcttaccgctatggataaaaccgatagccggcgcatatcccgccgccaggatagccgcttctgaaatcccgtacaggcacgatgtcgccgcgctaatacatcggttgacgacatcccccttctcccagtctttcggatcatagttacgaccatgccatttcacgccatactgcttcgccagtaatgcataggtcgcccgcacacgggatccttcaataccgcgcagttgctcaacggaacgacgggcgggaggcggctcacgaaaacgcagttcatacattttgcggactactttaagccgcaggtcatcatctaacgccagctttgcctggtaaagcaacttatcggctcgtgcgccgccgggttgtccggaggaatagacccgcactcccgcctcgcccacccataccaacagggtgccgaccgttgatgccaaatgcactgccgcatgggaaacccgcgttcccggttccagcatgatacaagcgaccgaaccgacgggaatatgcgtacggattcccgttttatcgatcagcacgaatgccccatccagcacgtcaatttgaccgtactggaggaagatcatcgaggttcgatcttttaacgggatcgggttgagcggtacgaacgtcacgcgtcgtctccgggtttgatcatcatcattccgcagccaaacgcccggcttttaccgtacccctgcgccagacgttgcaggaaaagcgcgggctcgttaatcaccagcacgccggtatagtccacgctgctaaactgaatcatctgccgggatttctctcgacgtatctgctgctgccggtaagcatcaacgctcgcctcgcgcagagtaaagccattttgctccccctggcgcgccagccattccaatgccgcctgctgctgataagaccaaatatcctggctatcgccctgcgttttacgctggcgtttcgcctccatcagcaaatcgtgacgcttaccgtttttgcaaattgtcggattggctcgcaagttaaaccgcagcgtctgtcccgcgctcagcattggcgcaaacgggcgagtctgtacgtcaaaaatcgtgctggcggcaggctgttcctgtgagagaacaaaaaagcgaaacgcgccctgtaactcttcgcggcgataaagaaactgccgttccttgccgccgggaaagagatcccataaccactggtgcatcacgtactcgccgcgctccaccagatgcaagagctgtgccggcgaaagctcgctggtgtgcagcgttattcttgagagatacacgcgtcctccttgcggagccacggcccctgattcacgctacgttcaccgaacagccattgctggcggctcaacggcatgtcgcgacgacgtaaaattttgttcgccgttaagccatcgtgttcaccttcccaccagcattcattctgtaatccggggagagtcagtttcagcgcattgaattgatcctgataccaacgatatgcttcacgcaggacatccgccgcattcccttccagcagttgcggcgcaagcggcaacgccagagggtgacttttgcgccccagatacagcgggaacacaggatgttgtaacgccgcctgaagctgcgccaacgtgtaaggcgcgtccggcgtcgcgctgacagcgatcatccaccaggcgtcggtgtagtagtcgcgtcgggaaatcagcgcgctcagtaactcaggatcctgcaactcttcacggcggctgaagtaacgcgccttacgtacctctttcggcatctgcaccgtgtgataatcccgcgcccagcgcgggttgccgctggcgcacagcaaaaattggtaatgacgattaaaggtgtttagccgttcctcttcatcgcggcgaatacccagcgccgcagctaataaccccaacagcgcagaacgcgaaggaagttcatggctgtggcgcacttcgcctggcgcatccacgccccaggaggccatcggcccatgaagctgaaaaaccagatattggctcataagccgccccttacgcgcagatgaagtcaagcacgtctttcatgcttccctgctgattcatcacgttaaagtttttgaacgccgtctcctgtgcatagacctcattcatattttcatgcagcgcggtaatacgcttaaccgcaacgttcaattggtctgtaccgttgatcggttcataaaacgcggccgccagtgaacgtggttggtcggtgcctttttcggccagcgcccacgaggcataggcacggctggcaaagctgttctgtttgccggtcggcgacactttcagcgccgcttcagtaaaggcgcgcagcgttttgtttgccagttcttcattgccgttcaggtttttcaccagcagatctttgtcgatgcagatataggtgtaaaacagcgcggagccaaagccggtttcgccgagatggcctgcgcctgcatcttctgccgatgcctggcgtaggtcatccacagcggtaaagaaatcgtcttcgatgatcgtttcgctgacgccgaaggcgtgggcgacctggcaggcggcttccacgttaaaatcagttttcttcgctaacatccggccaaacatggcaatatcgacggccatgcgatcgtgacgtaacagttccgcttcctcttctgttgccggacgtttttcttctgccagacggcgcgccagcgctttcacggcctcaaactcagcagggctgatatgcaccagttgctcggtttcagcattcgtcaactcatctttgggtttcttatcctcttttaccttgccaaagcagttggcgatgttcttgacgtactcaaccgcttttttggcgtcaatgccgctatcaacgaggatttgcgccgcctcacgagcaatgcgaccagtacgaataccaatatggccagctaatgcctgttcaaataactcagatgtacgccaggcgcgtttcaggctctgagaggagatacgcagacgtgttgctccgccaagcaccacggtttttggcgcaccggtatcatcacggttcaggttagcggcggggtaagcggtcagtaagtggagctgaataaacgttgtcataaagatatccctgttaatcttgttcgttatcggtatcgccagcctggtagtattccagcgcccagcggatacgaagaaattcggttggccgctgctggcggcgatggtggttcagcaagtcattctgctcctggcaccagcagaaaatatcgtctgcaagagaaaacaggttgaccgaaccatctaacagcttcaccgcacgccgtaactggcgcagcagttcatccggcgtttttaccgctaataggtgggagaagcgtaattttgacatcaccggagtgtcgccacctttcttctgtccaagctgcgcagcaaaactcttttgctcatcaataaatttgatatgtgcagccagtgccgctgtgattgccaatgcagtaacattccagggtgctttgtttttccataaagaatgtgtttgcattaacaatgaatgaagcccctcagccaaacaggcatcattcaccgttttactacgtcgtaagctggcacgtaatccacgtttttcttgtagttcatcatgccactgacgcaaagtggctttatcatctttcgtcacaacactcattcagcagcctcctgtttctttgctttggcggcttttgcgctttgcttttccgccgatgaagtaaaatattttttgcgcgccttcatgatgcgctccagatcgctgctctcgtaggggttggtaaagacgtgatcatcgaagtaacaacgggtaaacagccaaagttctctttgccatttattcagcctttcgtccggcttgtgtccgttttccagatcgtggatcagattgagaaagcgcccctgcgtcaggttccagaaatcaatgtcgataaaactgaaatcaccccgcgcatccttcgcattggtgaaccacgcttcttttagcgcactgcgaagcaggctcaacaggcgggccgcagtttgcacggccttacgtaaatcagggatcagaccttccgtcatcagcaacgggaagtgatgctcataccagcagcggattttcatattgtcgaaatccgcgccaaagccccggatccccgctttaacgtcagtcagcgagcgggcgttaaacaccttgactacctgcgcgggagattcgtaattcgcttccgtctggttgttctgacttaatcccagccagtcgcgccagataaggccgccgggctgcggtttaacggaaaagaaggcgttttgatcttttaccggggcgcgataaggcgtcagcgggtgccgccagccatcgtagttaacgccgtagttcttgacggtcataaagccaagaagctcatcgctttcagcgccgcaaatatcgcagcaacctgactgtaaggtggcaaaatccaggcggatacgacgcggcatcccccagtacgcctggagtttattgacctgctccggcgtggtaacggcattcgcctgctcgctggtccgcgtcgcggcaagccacgggaaaacggtcgcatcacactggtctggtaaaggcagatccgcagtatcctgcggcatcacgttgagccacagcttgcgccagatcggcgtttgccgctcgccctgatattcctgcaattcaaccagcgtggtcagtggcccgccgccgcgcagcccggtacgatagcctttgccgcccgcaggcgcgttaagctgcaacgagaacagcgccagcgccgcgcagtgcggacaaaaacgttccgttacgccgcgtttgacaaaatgatctttattgaacttcgtggtttgcgcgccaggtatttccggcaacaatgaggcaatagagactttttcgccgcttaacggttcaaaatcctgcataaacgagggggattccgcgccaaactgaaaagcgtgttctaacggtgctaatgccttatggagcacatcggcatgcaatccatcaaaccagatatcctcccaatttttgtatcttttcggcgcgatactgcattgcagcaatcccaacagaaactgccaggccgctccctgtaaatctgctcgcgttgcggcgatgtccaccacgttttcatccgccagatcgacgggggccagcttgcccgtggaaccgtctttgaaacggacggggagccagggcgttgttaaaagtgaaaaattgtccatatctgtattcgttattcccccatcatgccaatcaatccctcattcgccgaataaccacaagcggcaaagtccgtcaccacaatcaccgtggcaaaatccttatcctgatgctgttgcgcacaccacttacgcaagggttcgccgtctaatttttcaaactcgtctttatgtttattccaccagctctgacgtactcgcagcacgctcatctcccaggcgtgttcaccgctggcataaggggttacgacgctatccacgattttcgccagccacagcgtgacagactcttccgccagccgcgttgacattttctccggtaaagaatcgctaatttcagcacagtagcccggcgcaaagttaagcagcatctggccggcaaatgcccggtcgcaataaaatttgccttcctgcaattgctcggtttttgcaaatccaaccggcatgttgacatcctcaccgtagaccgactcaatcaacaagcgggcagattgcggcatccgaatcgtcccctgctcacgtaatatgcgctgcgtcagccacatgcgcccatgatcgggatagacataggcgctgttacgcatggcgctggataaccagttctctcgcggcgcgtcatcccactccggagcaagaatgcgcagcactggcgtctctcgctcatcctgcccactctttttcaccagaccgttacgatcgcgaatatgacgctgtagtcgaccggcccgctgaattaataaatccaccggcgctaaatcagagatcatctcatcgcagtcaatatccagactttgttcgattacctgcgtggcgataatgaccttaccggcacgttgcgcgccgctctgtttgccaaagagattcagcgtctgcgactcaatccgctgacgatcgtgaaaagcaaagcgactatggaagagtaaaaggttttccgtggcgacgaccttactcagttgaagctggcgatagatacgaatcgcatcatcaacggagttacgtatccaggcgatacagtttcctttttccactgcttcacctatacgttcaagacacgcctcttcactatgtagccagccaatatctacgcaacgctcaacctctttgcgtgtatcaacccgctgagaaatcagctctgtttgtgtgacctgagtcagccagggataatcgtcatggcctagcaacggcgcctgcacactacgcctcaccccacgggaaaatgccgccaccagcttatctcgctgctgctgcgatagcgtcgcagataacagaatagtggcgttgccattactggcctgccgttcgatcaaaccttcaagtattcgggacatccaggcatcacaggcatggatctcatcagccagtaagatcttgttgctaagacccagtaaccgcaggttgttatgtttaaatggcattaccgccatcatcgcctgatccaacgtgcctacgccaacctccgccaacaacgcttttttattgctgtcggcaaaccaggcggcgcatccctgactataaggctgcgcttcatcgggttcttccgtaccagaaagagtgaccgaccatattgactgattgaaacgatccattaagcgacgcgcgctatgcgccagaatcaggctgggacgggagtccggctgatacagcgccagccaggtgttcgccatacgttcaaacatcgcgttggctgtcgccattgtcggcagtccaaaatagagtccctgcgctttacctgccgccatcagtcgatgagctaatatgagcgccgcctctgtttttccggccccggtgacatcttcaagaataaagagttgggcgccatccacgttgatatccagctcaagcgccttttgttgtaacggtgtgggatgctgaataaaagggaaaagcgtttctatgcccgtaaaggcagacacattcgccgctgagggaaatagcgtgatggcagtttgtgctttagcgagagcttgctgccagtaggtatcaacaggcattttttccgcagtacgcggaaaataacggctggcagaaccagtccagtcagccagtacaaccgcagcggaaataaaccaggaaagttgctgaaattggtcgataccctcatcttcatcccaggcttcaggcaaagtaattaaaggaaagagcgcttttattctcagaagaaaatctcttgccgcgtctttatcctgctggcgaaaatggtccagctcctggattgcctctggagggcgtccatgatgacctgtagtgactggcatccaaagcgccataacgcgcttacttttacgaactgaaagcgaagaaggaggaaacaattcagggcattcacttagccaggagttccacaacatgtatcccagcgtggtatgcgcgattttttcataatgccgtgtaggctcattaaagatatttaaagcctcatgacggtatagttgctggaaggaatgagcaaactttccaatatcatgccaacataaaatccaggcaaaaaattgcgccgcctgctccttatcctggatgcctaatttttttagatagtggtcaataaaataaatattatttatcaccatccagtaacccacagccgcaacatctaaagaatgccagcaaagcaaatggtaatcatcaccgccgtcagtttctcctcttcgagactttccccaatagtgatatatcgacacgtaaactccagcatgtggataataaaagcactctacgcctttttaatggtcttttttgttgatatacctcacaaaaattgcacttcctgagattatatttaaatatgccgctcaattttatatattcttcagaaatatttaccccacgaataattattataaatttttccgcctttttcttctggaagaagcgctcaaagaggcttcctccaatgccttctgcataaaccaaaatttaaaaaaaacgaccatttgcggcgaatcatctaccttttgtctgaattatcgtcaccacaaaggattaccaaccataaatgtgctgtattaataatgtcgttcaaattctctcctgtagtaaactttatctgtttaataaaaaagagagaattgaacgatatattttactccggatattgaataatataaatttgaaggaaaatattatgccagtcactttaagcttcggtaatcatcaaaattatacgcttaatgaaagtcggcttgctcatctgttaagcgcagataaagaaaaagcaatccatatggggggttgggataaagtccaggatcattttagagcggaaaaaaaggaccatgcgctggaagtgttacactccatcattcacgggcagggccgtggtgaacctggagagatggaagttaacgtagaggatataaataaaatttacgcctttaaacggctacaacatctggcctgcccggctcatcaagatctgtttactatcaagatggacgcttctcagacacaatttttacttatggtcggcgacacggtgatcagccaaagcaatattaaggacatcctcaatatatcagatgatgcagtgatagaatctatgagtagagaggagagacagttatttttacaaatatgcgaggtgattggtgcgaagatgacctggcacccggaattacttcaggagtcgatttctacactacgaaaagaagtgacgggcaatgcacaaatcaaagcggcggtttatgagatgatgcgtcccgcagaggctccagaccacccgcttgtcgaatggcaggactcgcttactgaagatgaaaaatcgatgctggcctgtattaatgcaggtaactttgagcctacaactcagttttgcaaaataggttatcaggaggtacaaggtgaagtcgcttttagcatgatgcatccgtgtatctcctatttactacatacctattcgccgtttgcagagtttaaaccaacaaattctggttttttaaaaaaacttaatcaggattataacgactatcatgcaaaaaaaatgtttattgatgtaattcttgaaaagctatatctaacccatgaacgttctttgcacattggtaaagatgggtgcagtcgtaatatattactgacataaagatagtcagtaatataaccaatttaaaatccggctgcctgccggatttttcataacagcaagtataatcataccgcgtaaggacaatcacccttcatgcagcccgcactcgcgcttcagtccgaagaagcgtgtctcttcttccgccatacccggctcccatttgcgggtggtgtgcgtatcgcccaccgacagatagccctgatcccacagcggatggtatttcagaccgtgcttttgcagatactggtaaaccgtgcggttatcccagtcgataatcggtagcactttaaacacgccgcgttggatagcgagaacaggtaaatgcgcgcggctgccggactgctcgcgacgcagacccgcaaaccacgtctgcgctttcagctcttttagcgcccggttcatcggctcgactttgttgatctcattgtatttctcaatgccctcaacgccctgctcccacagcttgccgtagcgcgcttcctgccaggccggactttcgcccgcgcggtaaactttcaggttgagtttgagtttgtccgttagctcatcaataaactgataggtttccgggaacaaatagccggtatcggtgaggatcaccgggatatccgggcgaatctgattcaccaggtgcaggctcaccgccgcctggatgccaaagcttgaagaaagcacgtattcgccgggcagattttccagcgcccaagccacgcgttcttcggcagtcagcgtttccagttgagcgttggtttccgccaacgccagtacgcgatcgacttttggcagttcattcagggcatttagatcgagtttggacataagttcctcgcggtataccttgcctgatggcgcttcgcttatcaggcctacgcgggcggtaggccggataaggcatttatgccgccatccggcaattcaggttattcccagaaatcacgcgcgggatcgagcaccgggcgaatgatgcccgcacgcaccgtaaagtcgccgaagccttcacccgcttcacgctctttcgcccagcgcccaatcagttcatccagcgaggccagaatatccggctcggtgatattttcttgatacatccgtgggatacgtgtcccaatacggtttccaccaagatgcaggttataacgaccaggcgctttccctactaagccaatttccgccagcatcgcgcgaccacagccgttcgggcagccggtcacgcgcatcacgatatgctcatcaggaatgccgtgtttttccagaatcgcttccactttgtccgtgaacgacggcaggaaacgctcggcttccgccatcgccagcgggcaggtcgggaacgatacacaggccattgagttttcacgctgcgcgctcaccgcattcatcaacccgtggtcgcgcgccagcgtctcgatcttcgctttctggctttccggcacgctggcaataatcaggttctggttagcggtaatacggaactcgccctgatgaatcttcgcgatctccagcaggccggttttcagcgggcgccccggataatccaggatacgaccgttttcgataaacagcgtcaggtgccagttgttgtcgatccctttcacccaaccgatacgatcgccgcgaccggtaaactcatacgggcggatcggctcaaatttgatccccgcgcgacgctcgacttccgctttaaatgtctccagtcccacgcgctcaagggtgtatttggttttggcatttttcctgtcggtacggttaccccagtcgcgctgcgtcgtcactaccgcttcggccaccgccagggtgtgctccagcggcagatagccaaactcgctggccgtacgagcgtaggttttcttattaccatgctcaatagacagaccgccgcccaccagcaggttaaagccgaccaacttgccgttttcggcaatcgccacgaagttcatgtcgttggcgtgcagatcgatatcgttttgcggcgggatcactaccgtggttttgaacttacgcggcagataggtctgcccgaggatcggttcttcatcggtgatcgcgaccttctcctgatcgagccagatctccgcatacgcacgggtgcgcggcagcagatgttcggagatcttcttcgcccactcgtaggcttcagcgtgcagctgagactcgtagggattggaggtgcacagcacgttacggttcatatcgttagcggtcgccagcgcgtccagccccaccgagtgcagcatctggtgcaccggcttgacgttcttcttcagaatgccgtgaaactggaaggtctggcggttggtcagacggatactgccataaatcgtgttatccgccgcgaatttgtcgatcgcttgccattgcgtcgtagtaatcaccccgcccggcagacggcagcgcagcagcatcgcgtgacgcggctccagcttctgctcggcgcgctcggcacgaatgtcacggtcatcctgctggtacatgccgtggaagcggatcagcaggaagttatcgcctttaaaaccaccggtgagaccgtcgttcagatcttccgcaatggtaccgcgcaaatagttgctttccagcttcatgcgctcggcatcggacagtttaccttcgaccaccagtgggcctggatgtttttcgctcattagtagacatctcgctgataacggcgctcgacgcgcagctcacttaaatattcatctgccgattcgaggtccataccgccgaattcagcgatcacttccagcaatgctttttcgacatctgcggccatgcgcctggcatcgccgcagacataaatatgcgcgccatcattgatccagcaccacagctcggcaccctgttcacgcagcttgtcttgtacgtaaattttttctttttgatcgcgggaccaggccagatcgatccggctcagcacgccttctttcacgtagcgctgccactccacctgatagaggaaatcttcggtaaagtgcgggttgccgaagaacagccagttcttgccttccgcaccgtcggcggcgcgttgctgcataaaggcgcggaacggcgcgatacccgtacctgggccaatcataatcaccggagtctgcggattcgctggcaggcggaaattatcgttgtgttcaataaagacgcgcacttcgccctcttcttccacgcggtcggcgaggaagctggaagcaccacccgcgcgggcgcggccttcaatatcgtagcgcacgacgccgacggttacgtgtacttcgctttcgacttccgcctgcgcggaggcgatggagtacagacgcggcgtcagcggacgcagcaggccgattaatgcttcagcgtcgagctgcgccggagagaaacgcaccatatcaacaatgggcgtggtcgcggcgtagtgctggagctgcgctttgtcgcccactaatggcaacagcgactcactgcgcgtcagggtcgcgtagttctcaacaatgttggcggtattcaccgtcagctcgaagtgccactccagcgcttcggcgagcggcagggttttaccatcaaccgtcaccggctcatcgcctttcagccacagcaactcaaccagctccttcaccagagccggatcgttctgataccagacgcccagcgcatcgcccggctgatagcgcaggccggagtcgcctaaatcaatctcaatatgacgcacatctttttccgagttgcgaccggtgattttctgattcacggagagggtcgcgatcagcggcgcgtctttagtataggggctggtgtggatgtcgtttaccgcgccagtagcgacggattgcgaaggtgccgcgacaggtgcgcgagacttcagaacatcaaccacgcgggcgcgccattcgctggcagctgcctgatattcaacgtcagcatcgacacggtcgagcagacgttcaccgcccagttccgccagtttgctgtcgaaatcttttccggactggcagaaaaattcataagaggtgtcgccgaggctaaacacggcaaaagcggtgttttccagtttcggcgcttttttggagaacaggaatttatgcagcgcgacggcctcttccggcggctcgccttctccctgggtggacgtcactatcaccaacagtttttcactggcaatctgtttgaatttgtagtcgccggcgttcaccagtgtcacattaaggttggccgccagcagatcatcacgcagcgcttccgccacacgacgcgcattgccggtttgcgaagcggagataagcgtaacccccggcatcttccgctcaggaacaggcgtgacggcaacaacgcctgagcgcgggttcagtacgccccaaaaatagccggagacccaggcaagctgttcgggagtaaggtcggttgtcgcggcctgaaggcgcgccagttgctccggattaagcggaagcaacccagtcagtggagccggtgtcgtcatgcgtcgttatgttccagtaagcaaagcggatctatacacaaaatcattcaagttcgccgtaagctgagcgcgccccaggagcgtacataaatacgtgactggggtgagtaaacgcagtcaacacagatgcggcttgaaagatgaaatgtataagcgataaatcccaaactgaggataaggttaacggtgagaggaataacaattaaagaagggttggaaataacaaataaccaaatgaactaacctgttttagttatcgttattaacgccaaaatcgattttataattgattgataattattaaattttctggaaattcttaaattaattgcccgtcacaaggcggagaatggttttagttaatgataaaaaatgcgctttccggtaccctacggcggtttttttattgcctgagagttcatcatgtccaccacgttgtataaagatttcacctttgaagccgctcaccgcctgcctcacgtgcctgaagggcataagtgcggccgcctgcacggacactcgtttatggtgcgtctcgaaattaccggtgaagtcgatccgcataccggttggattatggatttcgcggatctcaaagcggcgtttaaaccgacttacgatcgtcttgatcactactatctgaatgatattccagggctgtccaatcccaccagcgaagtgctggcaaaatggatttgggatcaggttaagcccgtcgtgccgctactgagcgccgtgatggtgaaagagacctgtacagccggctgcgtctatcgcggcgaataaggtttattaacgcgtgggctggatgtcaaattgattccagcctatccacacgacgttttatcagtgaaaacattgtccagcgcggtgttaaaagcgcagcacatcaccggttgcaggtgcggttatttccggtagccacaaccgcccccaggcccctgtacagtgacaaccgcatagtttttcaggtttttgttcttgcagaaagcgcctgactcgccacagcgtgaacggtgatgcgcagcggagatgaaatccgccgacaagcgcgtaaatccgctttataccggtaatgttctgacagtgccggacaatatttgcgatcccccgatgcccgcatcccgtaatgatgactaatccttttgtcgattggtaaatcagtacgccctcatccaaaatggagtccggctccgcatcgtggccgccaaaaatgccgtaggcttcaggcgcaaccaccggtatttcccctgaccagataaagtttttgccaatcggcagggggtcacgcgtgtacatcattcggtagcgtgaatagtccacctcacacgacaatttttttatttttcgggtaataccgagaaaagtcattgccgcataacgttcgcgcgcaatatcgggatggcagatgattcgactgttatcaggaagccacggcacgccgccgcaatgatcgtaatgaccatgcgaaagcaccacagcagacacatcggacaggtcgatccccatcgccaacgcgttttgcataaaactgccatcagggccggtatcgaacaagatcgacgtagactcatcctcgactaacaggcttaatcctggccgggccttcaacgatttatccgctccagctcccttatgattttcgagcaataccctgatccttaacgccatggccttctcctgtagaaaagcctcccccgggaaaacgcggcctttttactttacaggtttgtaccagccattactggtacacagattatgattatgcaacggctatccttgttggcgcggggaacacggctacacgcaaaaattccagtcgttggcgcacggtttatccccgctggcgcggggaacacccgattaagatccgcagtctgcatcagtaactcggtttatccccgctggcgaggggaacaccgattctacggcaacaggccaggctgcgaccgcggtttatccccgctggcgcggggaacacatcaaacatggaaacccctttaatgagagcaacggtttatccccgctggcgcggggaacactcaggaacgcgcggcggaagagcttggtgtttgcggtttatccccgctggcgcggggaacacgctgcctttcccggagttccggcccctaaattgggtttatccccgctggcgcggggaacactcatgcgctataaaaatcagactgtcacatgccggtttatccccgctggcgcggggaacactgattattgacgacaacagcacagaccggcagcagtttatccccgctggcgcggggaacacaataatcggcaatttgtcctggacaggcacggcagtttatccccgctggcgcggggaacacgaatctggaggccaacagcgcggcgaaatcctcagtttatccccgctggcgcggggaacacactaaacgtatgtcattgtttataaactactttttatcagcaccacattccaccaacataatcgcaacaatttaaattattaaagaacagctaatttgctgattttgatgcaaaaaagttcatagaatgattttttctttaaatttaccaaaatagcgcgatccgtgcatcgctatggaaaaatttatcagcgcttttatacactcatcgaaattcacatagagaaaataaacaatgcaaggtaatggatgagtcacagacggcatcggcaggccgtctgtaagcttagtaatgcatcaggcgatatttaaatatttatgcgtttgcatagacagccgccagttacgtgcaatacacgtttcaatacacagacgcgtcgcgtcttctttctggctaatgggctgcaaagcaatcacgcgcggtttatcatcgctcaacgtggctaacagttcatccagcgcctcaatatcacgaactcgcccaacgggatgcttgatttcattggcgcgctccagcgcctgggaaagcacgtcatatcccccgcgcatattcacttttggtgaaaccgtgacccaggtgttaggcgtacagcgcacttcatgcgtcccgctggtttcaatctggcaactaaaaccactcttttcaagcagatcggtgagcggcatgaggtcgtgaatacagggttcgccaccggtgatgacaacgtgacgcgcggtatagccctgacggttaattactgccagcaagtcttcactgctcgcagcaccccatttgtcgctctctttggtttttgccagaatgctgaacagagacacttcccgatcgctcagtttatcccaggtatgcttagtatcacaccaggcacagccgaccggacatccctgtaaacgaataaaaatagcggggacgccggtaaaataaccctcgccttgtagagtctggaacatctcgttaatcgggtactgcatagcgttctctgttaaggggataatcgttaattattgcagatttcgtctgcccggtcatgcacagcggctgcgctattgaacagatacaaaaaaacccgccgaagcgggtttttacattaagaggtaaaagcaggattacgcctggcctttgatctctttacgaccgttgtacggtgctttttcgcccagagcttcttcgatacgaatcagttggttgtatttagcaacgcggtcagaacggctcatagaaccggttttgatctggcctgcagcggtaccaacagccaggtcagcaatggtagcgtcttcagtttcaccagaacggtgagagatgacagcagtgtagccagcatctttcgccatcttgattgcagccagcgtttcggtcagagaaccgatctggttgaatttgatcaggatggagttagcgatgcctttctcgatgccttctttcaggattttggtgttggttacaaacaggtcgtcaccaaccagctggattttgtcgcccagtactttggtctggtatgcaaaaccgtcccagtcagactcgtccagaccatcttcgatggaaacgatcgggtactgtttggtcagttcttccaggaagtgggtgaattcttcggaggtgaacgctttgttgccttcgccagccagaacgtatttaccgtctttgtagaattcagatgctgcgcagtccatcgccagggtgatgtctttacccagctcgtaaccagccgctttaaccgcttcagcgataacagccagcgcttcagcgttggaacccaggttcggcgcatagccgccttcgtcacccacagcggtgttcatgcctttgcctttcagcacttttgccaggtgatggaaaacttcagaacccatacggatggcttctttaaccgttttcgcgccaaccggctggatcatgaattcctggatgtcgacgttgttgtcagcgtgctcgccgccgttgatgatgttcatcatcggaaccggcatggagtatttgcccggcgtgccattcagttcagcaatgtgctcgtacagcggcatacctttagcggcagcagcagctttggcgttagccagagagacagccagaatggcgtttgcaccgaagttagatttattttcagtaccgtccaggtcgatcatgattttgtcgatgccagcctggtctttagcgtctttgccaagaatagcctgagcgatcgggccgttaaccgcgccaacagctttggttacgcctttacccaggaaacgggatttgtcgccatcgcgcagttccagcgcttcgcgggaaccagtagaagcacctgacggagccgccgccatacctacgaaaccaccttccaggtgtacttcagcttcaacagtcgggttaccacgggagtcgatgatttcacgaccgatgactttaacgattttggacattaggttttcctcaagtcactagttaaactaaaacttcagacaaacggtgcaccgctgagggtgcaccgccgttctaacttttttacttcgcctgacgtttctgatgctcgttggcggctttaacaaagccagcgaacaacggatgtccatcacgcggcgtggaagtaaattccggatggaactgacaggccacgaaccacggatgattcggtacctcaatgatctcgactaactgatcatcaccggaacggcctgcgacacgcagacccgctgcttcaatttgtttcaacaacatattgttgacttcgtaacgatggcgatgacgttcaacaatcgttgacgcgccgtacaactgacgtaccagactgtcatcgctaagctggcactgctgcgcgcccaggcgcatggtgccgcccagatcgcttttctcgctacggacttcaacgttaccgtcttcatcgcgccactcggtaattaacgccacaaccgggtacttacagtctggcacaaattccgttgagttggcgttgtccatgccggccacgttacgagcgaactcaatcaacgcaacctgcatccccaggcaaatgcccagataaggaatattgttttcacgcgcatagcgcgcagtggcgattttaccttcaacgccacgatagccgaagccgccggggatcaggatagcgtccaaatctttcagaatttcgacgccgcgcgtttcaacatcttgcgaatcgatcaatttgatgttgacggtaacgcggtttttcagaccaccgtgtttcagcgcttcgatcaccgacttataggcatccggcagttcaatatatttgccgaccatgccgatagtcacttcgcctgccgggttcgcttcttcgtaaatgacctgttcccattcagacaggttagcttccggacagttcaagctgaatcgtttacaaatataatcatcaagcccctgagatttcaacaggcctggaattttataaatggaatcgacatctttcattgaaataacggctttttccggcacattacagaacaatgcaatttttgcacgctcgttggcaggaaccgcacggtcggaacgacaaatcagaatatcgggctgaataccgatagacagcagctctttcacggagtgctgagtcggtttagttttcacttcgcccgcagccgccaggtaaggtaccagcgtcaggtgcataaacagcgcgtgttcacgaccgatatctaccgccaattgacgaatcgcctcaagaaacggcagcgattcgatatcaccgacggtaccgccgatttccaccagtaccacatcgtggccttcgccaccttccagcacgcgctctttaatcgcgttagtgatgtgagggattacctgtacggttgcgcccagatagtcgccacggcgttctttacgcagaacgtcggagtagatgcggccagtcgtgaagttgttgcggcgagacatcttggtgcggatgaaacgctcgtagtgccccaagtccaggtcggtttcagcgccgtcttcagtaacgaacacttccccgtgttggattgggctcatagtacccggatcgacgttgatgtacggatccagtttcatgatggtcacgttgagaccacgggcttccagaatggctgcgagggaggctgcggcaatgcctttacccagagaggatacgaccccgccggtcacaaaaatatagttcgttgtcatgcggaacctgagaagttaggtttaaaagacgatggaataaccaggacgggaaagcagtatacccgaacatgacctacgccacaaactttcattattcctcctcttcgtcaggctgacattcacacagggagggagaaaatagcccctttgaggtaaatgtttttgacgtaaatcaagcgcttgttatttaaaaaatcacacaaatcgctcttgaccgcctaaaacctttagagatcaatttcctggcgttttacttcctgccaaacttcttccattgtttccaggtctaccccggtcatttccaggcctctggctgcgacaatacgttcaacttcgcgaaaacgacgttcaaatttatcgttcgctttttgcaaagcgagctccgctttcgtacctaaatgacgcgccatgttgaccgtggcaaagagcaaatcgcccatttcctcttccagtttagcctgatcaacaaccgcctgccgcgcctcgaacatcacctcatcgatctcttcatagaccttatcgacgaccggtcccagcgtcgtccagtcaaagcccacgtttgagcaacgtttctggattttttgcgcgcgcatcaaggccggtaagctgcgcggaatatcgtccagcgcggaatgctgcgctttttgcgcgcgctcttccgttttgatttgctcccagcgaactaatgcttcttcgctattatccgcggaaagctcgccgaaaacatgcggatggcggcgctccagcttgtcgctgatggcagcgcagatatcattaaaatcgaagcggccttcttcctgcgccatctgcgcgtaaaacaccacctggaacaacaggtcgcccagttcgccgcgcaaatcgtcaaaatcctcacgcgcaatcgcatccagtacttcataggtttcttccagcgtataaggcgcgatgctggcgaaggtctgctctttatcccacgggcagccgttttccgggtcgcgcaggcgctgcatgagggtgagaagacggtcaatttgatggttagttgtcatggtttttaatcggttgtaaatactagcgacaattgtaacgtattattcttaaccattcacgcacagagatactacgacaacgcctatataataaaatatattgttaacaggcgttgaatgctacctttcccgtataactttaaaattattaatcgatacacaacaatataatatatcatataactaatttattaaaaaacagatatttgcaccaggcattataaataacatcaattaagtaaaaaaattatgcaaacactataagcctcccccccccaaagagccttccctttcaaaaaaaataaattatttcacttttacggaaaaacgagtagcatgcacgccagtttaatattcaaaaaagaccgcttttttgttttttctggaacatacatgaaataaatatattgaaagtattacatataatattctatgagcaggtacgatcattcagctcataagaatatactcataaaaatgtagaaatataatatttttattatgacctattttttacccaaagcccgcagcatggctctatgccgcatatcccttggtatacgcgtacaaaatgttgccataaaacacgttaattaaggataacacgatgaagtcatctcatttttgtaaactggcagtaactgcatctttagttatgggaattgtctccggcgctcaagccgcgggtagcaacacagcgaaggtcactttccttggtaatattgttgactccccctgctccgtcacattggatacggaagatcaaacagtcaatatgggttcaagtatcggtaatggcacgctgagtaatggtaaaacgaccatcaacaatgcccgtacctttcatatcgatcttgagggttgtacctgggctaccgagaaaaatatgaatgtggtattcactacaggtagtggaaccacagcggctacaggcgccacggataatctcgcgctgatgaagactgacggcactggcgctattagcaacgtaagcctggcaatcggcgatgctggcaaaaacaatatcaaactgggcgatacctatacacaggccattgcggacctggacggagataccattcttgatgagaagcaaagcctgaatttcaccgcctggctggttggcgcagcaaccggtaccgtgggcacaggtgaattcagcagcgccgccaacgtcactatctcttacctgtaattcagttaacagagtcacgacgataataccctgccgctttaggtagggtattcctgttgagttttattgcggaatatatttgatgaataacacatggaaaagtgttctttgcccaatagcgtgcggagtgggaatgcttctaagcctctccccttatagcgcgtcaggcaaagacatcgaatttaataccgatttcctcgatgtaaaaaatcgcgataacgttaacattgcacagttttctcgtaagggttttattctgccaggcgtctaccttttacaaattaaaattaacggacagactctgccgcaggaatttcctgttaactgggttattccagaacatgatccacaaggaagtgaggtttgcgcagaaccagaattagttacgcaattgggtataaagccggaactcgcggaaaaactcgtctggataacgcacggtgaacgacaatgtctggcgccagattcactgaaaggcatggattttcaggctgacctgggacactccacgctgctggtgaatttaccccaggcgtatatggaatacagcgatgtcgactgggacccgcccgcccgctgggataatggtattcccggcatcattctggattacaacattaataatcagctccgccacgatcaagaaagcggcagcgaagagcaaagcatcagcggcaacgggacgttaggcgcgaacctgggcgcatggcgactgcgggccgactggcaggccagctacgaccatcgtgacgatgacgagaacacttccaccctccacgatcagagctggagccgctactacgcctatcgcgcactaccgacgctcggggccaaacttacgctgggcgaaagctatctccagtccgatgttttcgacagctttaactatatcggtgccagcgtcgtttctgacgatcagatgctgccgccgaaactgcgcggctatgcgccggagatcgtgggcattgcgcgctctaatgccaaagtcaaagtctcctggcaggggcgcgtactgtatgaaacgcaggtgcccgcaggaccgttccgtattcaggatctcaaccagtccgtttccggtacgttgcacgtcaccgtggaagagcagaacggtcagacccaggagtttgacgttaacaccgcatcggttcccttcctgacgcgccccggcatggtgcgctacaagatggcgctgggccgcccgcaggactgggatcatcaccccattaccggcacattcgcctcggcggaagcttcgtggggggtcaccaacggctggtcgctctatggcggcgcaattggagaaagcaactatcaggccgtggcgctgggaagcggtaaggatcttggcgtggtgggcgcggtggcggtcgacattacgcactccatcgcccacatgccgcaagacgacgggtttgacggcgaaacgctgcagggtaactcatatcgcatcagctactcccgtgactttgatgaaatcgacagccgactaacctttgccggataccgcttctcagaaaagaactttatgagcatgagcgactatctggatgcgaaaacctatcatcatctcaatgccggtcacgaaaaagaacgctatacggtcacctataaccagaacttccgtgaacagggcatgagcgcctatttcagctactcacgcagtaccttctgggacagcccggatcagagtaactataacctgtctctttcctggtacttcgacttagggtcgataaaaaatctcagtgcgtcgctgaacggctatcgcagcgaatataacggtgataaagatgatggcgtttatatctcgctgtctgttccctggggcaatgattccatcagctacaacggtacgtttaacggtagtcaacaccgtaatcagctcggctattccggccacagccagaacggcgataactggcagcttcacgtcgggcaggatgaacaaggcgcacaggcagacggttattacagccatcagggcgcgctgacggacatcgatctgagcgcggattatgaagaaggatcgtaccgttcgctgggcatgtcgctgcgcggcggcatgacgctgaccacccagggcggcgcgctacaccggggaagtttagcgggcagcacacgtttgctggttgataccgacggcattgcggacgtccccgttagcggtaacggctcgccaacctcaaccaacattttcggcaaggccgtgattgcggatgtcggaagctattcgcgcagcctggcgcgtatcgatctgaacaaattgccggagaaggcggaagctactaagtcggttgtgcagatcacgctcaccgaaggcgccatcggctaccgtcactttgacgtggtcagcggcgagaaaatgatggcggttttccggctggcagacggcgacttcccaccgttcggcgccgaagtgaaaaacgagcgccagcagcagttgggcctggtggccgatgacggcaacgcctggctggcgggcgtaaaagccggggaaacattgaaagtcttctgggatggcgcggcgcagtgtgaagcatcactcccgtccacgtttacaccggagctattggccaacgcgctattgctgccgtgcaaaatgctggaaggtcagccccccaccgcaccgcagaaaagttctccgctgcctgcgcaaccgctaatccaggaacatacgcaaaccgatggccaaccggccgcgccggtggcgacaaccactcaaaccccgcccataccgctggctgacaaccatgcggtgaatcgcaaggatatggaataaagggaacctgtaatgaacaagaccaaccattttaagcgccaggcgcttatcgcttcggtattactggctgcgccgctggtatcgcacagcgcgattgtgccggatcgtacccgcgttatttttaacggcaatgaaaattcaatcaccgtcacgctgaaaaacggcaacgccactctgccctacctcgcacaggcgtggctggaagacgataagttcgccaaagatacccgctattttaccgccctgccgccgctgcagcgtattgagccaaaatccgacgggcaggttaaagtccagccgttaccagccgcggctagcctaccgcaggaccgggaaagtctgttttatttcaacgtgcgggaaattccgccgaaaagcgataagcctaatacgctccagctggcgctgcaaacgcgtattaagtttttctaccgcccggtagccgtcgcccggcaggtggataagacgcacccgtggcagacgaagctcacgctgacctaccagggcgatggtgtgatcttcgacaaccccacaccgttttacctcgtcatcagcaatgccggtagcaaagagaacgaaaccgcctccggctttaaaaacctgctgattgccccgcgtgaaaaagtgacctctcccatcaaaggtgcctcgctcggcagctcgccggtggtgggctacgtcgatgattacggcggccatcgcctgctggtttttacctgctcagggaatacctgcaaggtcaatgaggaaaaaacccgtgacgctgagaagaaagcgaataagtaatcctgtgcgaaagagatctatgacgatgttgactcgctggaaaatgctggtgctgctgtgcggtggattcgttaccggcaccgaggctgccggcacaaaaaccgtgcaactggagctgcatctggtcgtcactcaaccaccgccctgtacggtaggcggcgcttccgtagagtttggcgatgtcctgaccaccaaagttggcgatgcttctcaaacgaaacctgtgggctacagcctgaactgcgatggcagagcgagtgactatctgaagctacaaattcagggaaccaccaccaccatcagcggggagcaggttctgcaaacttcggtgcaggggttaggcatccgtattcagcaggcgggcaataagcaactggttccggttggcataacggattggctgaacttcaccctgagcggcagcaatgggccagagctggaagccgtaccggttaaagagcccaccacgcagttagcgggtggcgattttaacgccagtgcgacgttagtcgtggattaccagtgatggagagattcatagtgaaaagggtgcttatcctgacgcttttaatcacccagtttgcctgcgccgacaatttgacctttcacggcaaactgataaacccgcccgcctgtactatcaataacggtgaaatgctggaggtcagttttggtagcgtcattattgataatattgacggcgtcaattacctgaccgagatcccgtggacccttacctgcgacagcagctttcgcgatgacgcattaacttttacgttgagctatctgggcacggcgacgccttactccgcaaaagccttaaccaccagcgtccctgagctgggcattgaacttcaacagaacggcacggtgtttcctcccggcacgtcgctaaccatcaatgagtcatcgcttcccacactaaaagccgtgccggtaaaacagcccggtaaagagcctgccgaaggcgattttgaggcttttgccacgttacaggtggattaccaatgaaccgtatttttcaaactgccgggcatttgatcggaggcgtaatgttatgggcggtttgcaatacgctacctgccgccacgcctaatgtgcactacagcggtaagctggttgccggcgcctgtaacctggtagtggataatgacacgatggcgacggtggattttcatactattggcagtgacaatttcgacgccagcgggcaaacgactcctgttccattcacacttagcctccaggattgcaaaacagcgctagccaacggcgtgctggtgacctttcagggcgttgaagacagtaccctgcccggactgctggcgctggagccctcgtcggaagccagtggttttgcgattggcgtggaaacggctgcacagcaaccagtgagtatcaatgcaacagtgggtacagcttttgtgctgaaagaagggattaccaccatcaacttgcaggccaggctgcaaaaatacgctggtgaagaggttatgccgggggaattttcgggtagcgcaacagtgagttttgaatatcagtaacttctcaagttatatactcatttctaatattttatttaaataatggaaatttaaatgaatcaaaaagtattattttttctaagtataattgcatatcctgggataactcaggccattaaccaaaatgtaatgattgaaccattagtaatacgtgactcaacaaattatttagtactacctcaggctcaacaggctgaattctcacaatgcaaaagctggccgcatgatagcactgttattccagcaaaatatgaggcaaccctgcttaatggaagtctcatatctatgtttattggtggcataacagttaatttatatacaacagcagatgtcaaagttaatacagatgcccagtgtacattactcaatggtaattttcctggttattacggcataacatgctttgttactggttatgacacagacaaagctgtacctgtaaggacagataatggcatgtcaattatcgaaagtaaattatatgctacaggaacaatgagatatataacagagatcccgatggatggcagtggctttcagggtatggcgattggtggtgcagtagtaattaatacaggcgcaataacaccaacccctaatacgggtgttatttctaacataacaatgccaccactatatgatcccgggtttatttttacggtacctggatgcggtcaatacaaatatcattctgggacaggttctgtttttacgaataacaattcaacttatacggttgcatcgccgattggtttcataactgcgtctttggataagaactccgtgttaaattataatgaacttcattataacgataaggcagaaaatatagaactagggaaaatttatttgatgtataaggagaaaaatgtcacgtggggtgaaggattcgattatacattggaaaatagcacgatcaatgtagtttgtgctgatagcaggattaaaacaaatgtagattatcaatgtaggaatggtgatatgggggcatgcaacaatggcgaactgggaagaataatcggcaactgggaacgaataaacgttgatactaattgcagcgtgacagttattttgccctggcaatagtatttttcttaatagatctgagtttacgattgcatacttttatactcatataccctaaataattcgagttgcaggcaggcggcgacgcagtgacaaattcgtctgatacgaatttgaacagccgaaggctgcctgcggtgggggacaaggatgtcccccatcaatccccggggcttacgctggtcagtgactggggggagcgaggacaaattggcaaggccgatgtgaacgccacttacggcggccctttagggcgaggcccggagagccgggccatgccaacacacaggcaacgtaaagtataacgggtagatatatcagactactttgtagataataacgtttcactttaccccccgtgcagtcgccgtgcatcaatcacatccggcacctggttcagcttaccgagcacgcggcccagcacctgcaggttgtagatctcgatggtcatatcaatggtggcgatctgctgtttaatgtcgctgcggctggcgacgcccagcacgttgactttttcgttagccagaatagtggtgatatcgcgcagcaagccgctgcgatcgttggcctggacgcgcaccaccagcgaatatcccgccgagtagctttcgccccataccgcctctacgatccgctccggcgcatgggagcgcagttccgccagctgttcgcagtcggcccggtgcacggaaattccccgcccctgagtaatgaagccgacaatttcatcgccaggaatcggctggcagcagcgggcaatgtggtgcatcaggttaccaaccccttccaccaccacgcgcccgtcgtctttacgacgattttgcggcgcgtatgttttttgctgaagctgtttcagcgccgctgcatcctgctcctccgcactcggcttattgaactgcgattgcaggaaattcaccatctgattaagacggatatcgccgccgcctatcgccgccagcaactcttccagctcattaaagttgtagcgcggcagcagatgtttttctgcctctttcaggctaatccccaaatgcgccagctcatcgtcgaggatctgccgtccagcctggatatttttgtcacgatcctgcttgcggaaccaggcgtgaattttcgagcgtccgcggctggtcgtcacatagcccaggtttggattcagccagtcgcggctgggattcggctgcttctgagtgataatttcaatttgatcacccatctgcaactgataggtgaatggcacaatacggccgccgattttagcgccaatgcagcggtgcccaacatcgctgtggatgtggtaagcaaaatcgagcggcgtagatccggcaggcaagtcaaccacgtcgccttttggcgtaaaaacgtagacccgatcgtcaaacacctggctgcgcacttcatccagcatttcgccggaatcggccatctcttcctgccaggcgatcagcttacgcagccacgcaattctgtcttcatgaccggagcgcacgccgccggacgcggcgccttctttatacttccagtgtgccgccacgcccagttcggcgtcttcatgcatctgtttggtacggatctggatctcaacggttttaccgcccggtcccaggaccacggtgtggatagactggtaaccgttcggtttcgggttagcgacataatcatcgaattcatccggcaggtgacgatagtgcgtatgcactatccccaacgcggcgtagcagtcctgcagacgttcagcgacaatacgcacggcgcgcacgtcaaagagttcatcaaacgccagatgctttttctgcattttgcgccagatgctataaatatgttttggtcgtccgtagacctccgcctgcacgccttcgtttttcatttcggcgcgcagatgtccaacaaactcttcgatgtaatgttcgcgatcgagacggcgctcatgcagcagtttggcgatgcgtttgtattccgccggatgcaggtagcggaaacagtagtcttccagttcccacttcagttgcccgatgcccagacgattagcgagcggcgcatagatgttggtacattctttcgccgccagcacgcgctcatcttccggcgcctctttcacttcgcgcaaatgagcgattcgctcggccagtttgatcgccacgcagcggaaatcatccaccatcgccaataacattcgacggacgttatcaacctgctccgaagaaacagagtcgttatgagtggcgtttagctgacggatcgccgccatatcgcgcacgccatgaatcagggtaacgatagatttgccgacgctttcgcgcagtacatcttcgctgactacgttggcgtcggccagagggaacagtagcgccgcccgcagcgtgtcgatatccatactcagcgtggaaagaatttctaccatctccacgccacgccacagcaacagatccgcatccggatgtccttgtgtctgttgcaggcaatacgcccaggtttcggctaagcgctcacacgactgctggctggaaattcccaggcttgcgatccacttcttcggatcaaattcaccagctttattaatatgtgcacttcttaccgcgaccatcgtcctctccttaagggaccaggcctaccgaagtcggtaagccggtaatcattacatgcgctcgaacagaaccattgattccagatgtcctgtgtgcgggaacatgtcgagcatcgctaaacgcgtaacctcatatcccgcattgaccagcgcttcactatcgcgcgccagcgtcgccgggttacaggatacataaacaatgcgaataggttttaattttataatatgtcgcatcactcctgtagcccccgcacgcgcaggatcgagtaagactttgtcaaagccgtttttcgcccacggctgcttcgtgacatcttcctccaggttctcatggaagaatgtcacattatgtaaaccattgcggatggcgttttcacggcctttttctaccagcgccggaacgccctcaaccccaatcacgcttgccgcgcgcgttgccagcggcagcgtaaaattccccattccgcagaacagatccaggacacgatcctcggcgcgcacatcaagccactccagcgcgcgggcgaccatttgctggtttaccgcctcattaacctgaataaagtctcgcggactgaaggctaaacgtaagccgtgcgaatcataccagggcgcttcgccagataccgtttccagtatctcgctaaacggcgccagaaacagagacaatccctcagaatgcgaaaagcgttccagtttttctttatccgccgcacttaatggcgcggtatggcgcagaatcatcagcgtaccgcttcccgcctgtaccagctcaacatgcccaagatgtcgggtgccgtgtaaactcgccagacacgccctgattcggggcagcaatgctgcaagctggggcgccaaaacagggcactgttcgacattgacgatatcgctggaacccgctttgcgaaatcccatttgcagcggtttatccggcgggcaattcagacttaaccgcgcacgacgccgataaccccagggcgcgccggcgatgatgtcattcacctcgtgtttcatcaaacgcgccagcgccgcgcttttgctgcgttgttgcagggcgatgctgacatgctgttgctgacaaccgccgcagacgccaaaatgcgggcagcgcggcgtttctcgttccgggctatcattcaaacggcgcgaaacgcgtgcgcgggcaaattgctttttatcttctgtaataatgacttctgcgctttcctcaggcaataaaccggggataaacagcgcttttccgttatgacgggctacgccctgaccaaatgaatcgaggtcattgactttaacggttatgatctgacgcgtcgtcacgcgccgttttgcagagtagaattgcgccatcgaccagctttttctcaatttaacagtgtgaccctaattgtcccataacggaactccatgaccaactacagcctgcgcgcacgcatgatgattctgatcctggccccgaccgtcctgataggtttgctgctcagtatcttttttgtagtgcaccgctataacgacctgcagcgtcaactggaagatgccggcgccagtattattgaaccgctcgccgtctccagcgaatatggtatgaacttacaaaaccgagagtctatcggccaacttatcagcgtcctgcaccgcagacactctgatattgtgcgggcaatttccgtttatgacgatcataaccgcctgtttgtaacgtctaatttccatctggccccctcacagatgcagcttcccgccggagcgccgtttccacgtcgtctgagcgtcgatcgccacggcgatattatgattctgcgcaccccgattatctcggagagctattcgccggacgagtcagcgattgccgacgcaaaaaataccaaaaatatgctggggtatgtggcgcttgaactggatctcaagtcggtcaggctacagcaatacaaagagatttttatctccagcgtgatgatgcttttttgtattggcattgcgctgatctttggctggcggcttatgcgcgatgtcaccgggcctatccgtaatatggtgaataccgttgaccgcattcgccgcggacaactggatagccgggtggaaggatttatgctgggcgagctggacatgctgaaaaacggcattaattccatggcgatgtcgcttgccgcctatcacgaagagatgcagcataatatcgatcaggccacctcggacctgcgtgaaacccttgagcagatggaaatccaaaacgttgagctggatctggcgaaaaagcgcgcccaggaagcggcgcgtattaagtcggagttcctggcaaacatgtcgcacgaactgcgaacgccgctgaacggcgtcattggctttacccgcctgacattaaaaacggagctgaaccccacccagcgcgaccatctgaacaccattgagcgttccgcgaataatctgctggcgatcattaatgacgtgcttgatttctccaagctggaagccggtaagctcattctggaaagtatcccttttccactgcgcaacacgctggatgaagtggttacgctgctggctcactcgtcgcatgataaagggctggagttgacgttaaatattaaaaacgacgtcccggataatgtgattggcgacccgctgcgcctgcaacaggtcattactaatctggtgggcaatgccattaagttcaccgagagtggcaatatcgatattctggtagaaaagcgggcgctcagtaacaccaaagtacagattgaagtgcagatccgcgatacggggatcggcattccggaacgcgaccagtctcgactgtttcaggcgtttcgccaggccgatgccagtatttctcgccgtcacggcggcaccgggcttgggctggtgattacgcaaaagctggtcaacgaaatgggcggggatatctctttccacagccagcctaatcgcggctcgaccttctggtttcatattcatcttgatcttaacccaaatgtcattattgacgggccgtcgaccgcgtgtctggccgggaaacgactggcttatatcgaaccgaatgctaccgccgcgcaatgtaccctggatctgctgagcgacacgccggtggaagtggtttacagcccgaccttctccgcgctgccgttagcgcactacgatattatgattttgagcgttccggtgaccttccgcgagccgctcaccatgcagcatgaacgtctggcgaaagcagcgtcaatgacggactttctactgctggcgctaccttgccatgcgcaaattaacgccgaaaagctgaaacaaggaggcgcggcggcctgtctgttaaaaccattgacgtcaacgcgcctgttgccagcgctgacggaatattgccagttgaatcaccatcctgaaccgctgctaatggataccagtaaaatcaccatgacggttatggcggttgatgataatcccgctaatctgaagcttatcggcgcgttactggaagataaagtccagcacgtagaactttgtgatagcggacatcaggcggtggatcgggcgaaacaaatgcagtttgatctgattttgatggatattcagatgccggatatggacggcatacgcgcctgcgaattgattcaccagcttcctcatcagcagcaaacaccggttattgccgttacggcacatgcgatggccgggcaaaaagagaaattgctcagcgcgggcatgaacgactatctggctaaaccgatagaagaagagaagttgcataatctgttgctgcgctataaacctggcgccaacgtagcagcgcgcctgatggcgccggaaccggctgagtttatcttcaatccgaatgcaacgctcgactggcagcttgcgctccgccaggctgccggtaagcccgatctggcacgggatatgctgcaaatgctgattgattttctgccggaagtgcgcaacaaaattgaagaacaactggtgggagaaaatcccaacggtttggtcgatctggtccataagctacacgggagctgcggctatagcggcgtaccgcggatgaagaacctttgccagcttattgagcaacagcttcgcagcggcgtccacgaagaggagctggagcctgagtttctggagctgctggatgagatggataatgtcgcgcgtgaagcgaagaagatattaggctgatattcgccggatggcggcgtgaccgccttatccggcctacaactcagcgtaattgttgccccgctttcagcgttgcagccacgttgcgcgcggtcattcgtacgttttcactcgcattcttcagcgcgtcctccagcgtgcagatggtataaatcacgctgaaaacggcatcaagcccatgttcatgaaccacgccaacgtcctccgtcaggctacccgcaataccaattaccggcttgttataccgtttggcgatgtttgccacgccaatagggactttaccgtgaatggtctggctgtcgatgcgtccctcgccggtgatgactaaatcagcatccgcaagacacgcttccagatgaagcgcatcggtgacaatctcaatgccacgccgtagctgcgcgccgcaaaacgcgtataacgccgcccccatgccgcctgccgcgccgccgcctgccagatccaacacatcgacatgcagatcgcgagcaatcaaatgcgcatagcgagtcaatgccgtctccaggcgttcaatcatttccggcgtcgcccctttttgcggaccaaaaaccgcagacgcgccctctttgccggtaaggggattcgtgacatcgcaggcgacctctatatggcacgccgacaaacgcttatccaggccgctgatatcaatgctggcgagtgtttccagcccaatgccgccttgcgcaatatcattgccctgcgcatcccgtagcctggcccccagcgcctgtaccatccccgcgccgccatcgttggtggcgctaccgccgataccaataatgatatgctcaacgcccgcatccagcgcatgacggatcagctcgccggttccccatgacgtggtcttcaacggatcgcgttgcgcgggcggcacctgctccagcccgctggcggccgccatttcaatgaatgcggaacgcgcatcgccggaaagcccataaaacgcattgacgcgatgccccaacggcccggtgacctcaacatgcacgattcgacccgccgtcgcttcaaccatcgcttcgacagtaccctctccgccatcagccagcggcaatttcaggtaatcggcgtcaggccagatctcgcgaaatccttgttcaatggcggtcgctacctcaagagcactcaaactttccttatacgagtctggtgcgatcactattttcataagtcgtccttacgcatgttgatcctgttaagcatacacccagagaagaaccggttccttacggaaccggttctgacttaacgcaccatgcaaggacgcttattatcaaacgtccagccaggaattaagtactgcattcccatcgcgtcgtcacgcgcgcctaagccatgtttttgatagagctcatgcgctttcatcacctgatccatatcgagctcaacgcccagacccggtttggtcggtacttgcaccatgccgcctttaatttcaaacggttctttagtcagacgttggttgccttcctgccagatccagtgggtatcgatcgcggtgatcttgcccggcgccgccgcggcaacatgggtaaacatcgccaacgaaatatcaaagtggttgttagagtgcgagccccaggtcagaccgaactcatgacacatttgcgccacgcgtacagagccttgcatagtccagaagtgcgggtccgccagcgggatatcgacggattgcagcgacagcgtatgccccatttgacgccagtcggtcgctatcatattggtggccgtcggtaatccggtcgcgcgacggaattccgccatcacttcacgtccggaaaaaccctgctccgcgccgcacggatcttctgcataggccagagaacctttcaggtatttaccaatgctgatcgcttcgttcagcgaccaggcaccgtttggatcgagcgtgacgcgcgcttgtgggaaacgtttcgccagcgccacgattgactcggcctcttcttcgcccgccagcacgccgcctttcagtttgaagtcgttgaagccgtatttttcataggcggcttccgccagacgcactaccgtttccggcgtcatcgcctcttcatggcgcagacgataccagtcgcattgctcatccggctggctctgatacggcagcggcgtagccttgcgattaccgacaaagaacagataacccagcatttcgacttcgctgcgctgctgaccgtcgcctaacagcgaagcgacgttgacgcccaagtgttggcccaaaaggtcaagcattgccgcttcaatacccgtcaccacatggatagtggtacggagatcgaatgtttgtaaaccgcgtccgcccgcatcgcgatcggcaaactggttgcgaacggcggtcaggacatttttatattcacccagcgtttttcccaccaccagtgggatcgcatcttccagcgttttgcgaattttttcgccgcccggaatctcgccgaccccggtatggccggagttatctttaataatgacgatgttgcgcgtgaagaacggggcgtgcgcgccgctcaggttcatcagcatactgtcatgacccgcaaccgggataacctgcatttcagtcactacaggcgtcgtaaattgagtactcataactgtgtccttattcagaattagtgacgaccaaaaacagggcgtttgcggtcaaaagtccagccggggatcaggtattgcatcgggcctgcatcattacgcgcgccgcctggcagctttttatacgcgtcatgcgcttttcgcacctgttcccagtcaagctccacgcccagtcctggcgcatccggaacggcaattttgccgtttttaatttccagcggatttttagtcaggcggcaatcgccctcctgccagatccagtgcgtatcaatagcggtgggtttgcctggcgccgccgcgccgacatgggtaaacatcgccagtgaaatatcaaaatggttattcgaatggcagccccaggttagcccccagtcatcgcacagttgcgccacgcaaacggcgccggtgagagtccagaaatgcgggtcggcaagaggaatgtctaccgcgttgagcatcaccgcatgccccatttcgcgccagttggtggcgatcatattggtcgccaccggcagtcctgtcgcgcggcggaactccgccatgacttcacgaccagagaatccttgctccgcgccgcacggatattccgcgtaggtcagtacatctttcagccctttgcacaacgcaatggcttcatccagtagccaggcgccgttcggatccacggtaatacgcgcgtccgggaagcgtttttttagcgcgcgaacagtatcaatctcttgttcgcccggcagcacgccgcccttgagtttaaaatctttaaagccgtagcgatcctgagacgcttccgccagccgcacgaccgcgtcgctgttcagcgcttcctgatggcgcagacgataccattcatgactgcccggcgtgctttccagatacggcagatcggttttagtgcgatcgccaatatagaagagatagcccaacacggtgacggcatcgcgctgtttacctggccctaacagttcacagaccggcacattaagcgcctgtcccagtagatcaagcagcgccgcttccaaagccgccaccgcgttaacccgcagttcaaacgtccatgcgcctttgccaaaggtgtcaaaatcagcagcctggttgcctttatgcacctgctgcaccactttgttcaggcgggcgacttcctggcctaataccatcggaatagcatcgaccagcgtctgataaatcacttctccgcccggcgcctcgccgacgccagtatgcccggcgttatcggtgaggacgacgatgttacgggtgaagtacgcgttatgcgcgccgccgatgttgagtagcatactgtcatgtccggcaaccggaatgaccttcatgtccgtaataacgggactggattgcgttgtcatgataattgtcctgcgacaggtttcagttcaatacgcttaatatcgcctaccagcaccagatagctgatgatggccaccagggcatgtacgccgacatagatcaacgcgccgttgaaggaaccggtggtgccaacgatgtaaccaatcgcgattggcgtcacaataccggaaatattgccgaacatattaaacaagccgccggaaagaccgctgatctctttcggcgcggtatccgccattactgcccagcccaacgcgccgatacctttaccgaagaaggccaacgccataaagccgatgatcatccattccacgttcacatagttacagaacaccataaccattgacagcaacattcccagcacaatcggcgtcttgcgcgcgatattcagggagccagtacgacgcatcagccagtcggaaatgatgccgcccaacacgccgccgataaagccgcagactgcaggaaccgaggcgacaaagcccgctttgagaatcgacatgccgcgcgcctggaccaaatagaccgggaaccaggtaataaagaaataggtcaatgcgttaatacagtactgaccgatgtaaacgccaatcatcatacgagagcccagcagctgtttgatctggccccatttgacgctaaacggtactttcgctttggtgtctttctgatccatattgatcagcgcgccgccttctgcgatgtactccaactctttcttatttacgcccggatggttatttggttcatggataactttcaaccagataaagctgatgatgatccctaacccgcccataaagaagaagacatgcgaccagcccacttcgtgcgtcagccagcccataatcggcgcgaaaataaccgtggcaaagtattgcgcggagttaaagatggccaccgccgttcccctctcctgcgccgggaaccaggccgcaacgatgcgactgttgcccgggaaagaaggcgattccgccagaccgaccaggaaacgaagcgtaaagagggcgacaataatgccgaaaccactaaagatatcgacaaaaccctgcaacagggtgaagactgaccaaatgaaaatagaccagaaatagacgcgtttggaaccaaagcggtccagcagccagccgcccgggatctgcccgataacataggcccatgaaaaagcagaaaaaacatagcccatgcctaccggatcaaggccgatatctttggccatttctgagccggcaatggacaatgtggcgcggtcgccgtagttgaaggatgtgacgataaacagcatcaccactatccagtagcgggcgttcgtgcgtttctccgcactgctcgccgcgtgacttaatgaactcattgttgcactcctgaaatttcgcgttagctacgctcactctgaactgcacaaccggtagggaatcagagataacgtttccttgttgcagcttttattaggtcgtttgctttgcacgctgcatgcttttattcactggcaggagaagtataaaaagcgcgccacacacactcaccgtgcaacaacacagtattttggcgatgaattacgcctgtttatggcaaaagcccaggacagtggaagccacttcacggaaatgaaatcagaaggcgtcggcgtcgacgcaggaggaataaaaagagaagaatgtgaaacaggtcgcttgattacatgaaaacgcccgtaaaaaactgccgcttttgcgggcatatgcccaaagctaacacgattcagttactttacactgtgtacaggtcgtgattttgcttactggcaacgcaagcaaacgaaaaggtaccctcccgtaggggggagggatttacctcaggaaagtaaagttccccagttttcaacccagggattggactggctctccggctccggatgttcgctggcgtcaatgaataacatctcccccacccgctgcgcgctttgctcttgcaacagggcatcaaactgtttgccgccattacagaaattggggtagctgctatcacctagcgcaatcaccccgtaacgcaggtttggctgaaaacccaacgtatctttaatgccgtgaaagagcggcgcaatgctatccggtagatcgccctgcccggtcgtcgaggtaacgaccagcgcaaccttatcctgatattgctgccagtcggacagttcaggatcttcaaacacgatcgcgctgtgcccctgtctggcgaggatcgcttccgcttcttccgccaccagcagtgagttgccatacatggtcccgacaaaaataccaatttctgccattatgcgtatctccctgaattatgcctgatgagtctcatcctgccgggacgccgccgtaaactcaaccctttcattgtcagggagaagtccacgccagccaaactgtgtcagcgcctgcatccaggtttcatccaacccggcctgaatcatcaacggctgtccggtgaaggggtgcgtcagctcaagccgactggcatgaagcatcaggcgacgacaggcaaaatgctctgcggcgctgcggttttgtcgcaaatcgccatgtttactgtcgccgatgataggatgacgcagatgcgccagatgacgacggagctggtgcttacgtcccgtttttggttctagctcaaccagaccataacgcgtggtgggataacgcccggtcggtaccgccatttcgaccgtcgccagtccgcgatactgcgttacagccggctggggcgctttatcttcgcgggcgaatttatcggcaattttatcgcgctcttccaccagcggataatccagtaccgcgtcatccatcagccagccgcgcacaatggcatggtagcgtttacggatgtggtgctgctcgaactgctgcgccagacggcgtcccgcttcgctggacagccccattaacagtacgcccgacgtgggtctgtcgagacggtgggcggtaaaaacatgctggccgatttggtcgcgcaccgtttgcatgaccacgactttttcgtcgcgatccagccagctccggtgaacaagccagcctgcgggtttattcacggcaaccagccacgggtcttgatagaggatctccagcatcaggatttatcgcggacgaatagcgcatccagatcctgcaaaaccgccaggatcgcctcccgctgcggatgatccgccgccagcgccatttcataataaggggcgacggcaaatgcctcgggcagcggctgcgcattatcaagtagggtatgcatacgtggaatcaatacccattgcagccattccagcggttccatggtatccataaaaaatggttgggtgctggtaaacaggtgcgcctgcggcgcatcctgccgccagtggcgatgctcgcgcagcagcgtttcaagcgcatgtaactgctgacgcacacggtcatgagtcgtcatgttaaaaacctcaatgatgaaaatctggcgcgaagaataacaaaaaaaagggagcactgtataaacagtgctcccggttcgtttcgcagcattccagctacttttcgtgctccctgctcatccgtgacaacttttcctgtgaccttacggcctgttcatcctgaacgtttgcatcctgcgcacatcgcccgatgtgatagcttcttcctgaagcgtccctggtcatccagacccgccgaacatcctgatcggctctcgttctccgtcctggaggtgtcctttaacgcatcctgcgctttccactttgcttcatcctgaagcctttccttgtaacaccatcctggcgtgtcctgccgaagcgtcatcatcctgacgttcgcttcgttgtacgactccctgtcgacgaagatagaatcgcctgtttcaccttgtcttacaagacgcttacagacaataccttaagtaaattttcatatgaaagtgcgcaaaaacattttaacatgttgttttatatatatttatataagaaaacggggctcagtatccgctgctatcctagcgatctcctacagactttgtaagagatctctcacacccgttagggcaaacgattacagaagaggattaagttgcgtaaggaattccgcaagcgttgcggcaagaacggtacgattacgggtgcccagcgtttctttaatcacctcgccggacagattacagaccgaaatgacctcaagctcattttcctgcgtcgcaataaaaagcgtgggaggaagcttgagccgcttttgcgtgaccaggtggcctatcagattttcctgcacgcgccgaaagtcatcctgactccaggtttgcagtagcgtaagcttttcatccgcaaactgcgcgggcatgtcgccagcaaactgcgtggtgtaaaacgcgtggagcgcaggttgtaccataatatcaaaggcgcgttcaaccgcgtttacattttcttcgccttcaaaaggctgcggctgccagtaaacggcatcgcgggttgaagaaataatgcacggagaaggtacgccatacagttcttcgctcaacggccagctaccgtgtttttcttgccacgcgtcgcagtaacgcgtcgtaaaggctttcaatgcctgcgctgtcagttcgtccaccagtttctctcttcataaaagccaggatacacttgacgcatagtgtatctggtttatgacggtgaaacatgtcttcttatgaaaaccatcaggctctcgatggcctgactctcggaaaatcaacggattaccgggacaattatgacgccagcctgctgcagggcgtaccgcgcagtttgaatcgcgacccgctcggattaacagccgataatttgccgttccacggcgcggatatctggacgttgtatgaactttcctggcttaacagccagggtcttccgcaggtcgccgtcgggcatgtcgaactggattacaccagcgttaatttaatcgaatccaaaagctttaaactgtatctgaacagctttaaccagacgcgctttgacacctgggagacggtgcgccagacgctggagcgcgatctgcgcgcctgcgcgcagggcaacgttagcgtgaggcttcatcgtcttgatgagctggaaggacagcctgtcgcccatttccacggcacctgtattgacgatcaggatatcagtatcgacaactaccagtttactaccgactatctgcaacatgcggtcagcggcgagaagcaagtagaagaaacgctggtcagtcatctgttgaaatccaactgcctgatcacccaccagccggactggggctcgatacaaattcagtatcgcggacgcaaaatcgacagggaaaaactgctgcgttatctggtctccttccgtcaccataatgaatttcacgagcagtgcgtagagcgtattttcaatgacattctgcgcttctgccagccggaaacgttaagcgtttatgcacgctatacccgccgcggcgggctggacattaatccctggcgcagcaataccgatttcgtgcccgccacgggcaggctggcgcgacagtaatttttttgtcaattttgcgtgccggattgcgcatgtaaggttgtgaaaggtcatcagccagggctattgtaatcaacagggaatggcgtgttgcgtcccataaggagtttacttgattacacatattagcccgcttggctcaatggatatgttgtcgcaactggaagtggacatgctgaaacgcacggccagtagcgacctgtatcaactgtttcgtaactgttcacttgccgttcttaactccggcagcctgaccgacaacagcaaagagctgctgtcccgctttgaaaatttcgatattaacgtactgcgccgcgagcgcggcgtgaaactggaattgattaatccgcctgaagacgcctttgttgacgggcggattattcgtgcgctacaggctaacctgttcgcggtgctgcgcgacattctctttgtgaatgggcagatccataatgccggccgtttccagcatctggatcttgaaagctcaacacatatcaccaatctggtgttctccattttgcgcaacgcccgggcgctgcacgtcggcgaagcgccaaacatggtggtatgctggggcggccactcaattaacgaaaacgagtacctgtatgcccgtcgcgtcggcacgcagttgggattacgcgagctgaacatctgcaccggctgcggccctggggcgatggaagcccccatgaagggcgcggcggtcggtcacgcacagcagcgctataaagacagccgctttatcggcatgactgaaccttccattattgcggctgaaccgcctaacccgctggtgaacgaactgatcatcatgccggatatcgaaaaacgcctggaagcgttcgtccgtatcgcacacggtatcatcatcttcccgggcggcgtgggtacggcggaagagctgctttatttgctggggattctgatgaatccagccaataaaaatcaggtgctgccgctgatcctgaccggaccaaaagagagcgccgattacttccgcgtgctggatgagtttattacccatacgctgggcgaagcggcccgccgtcattaccgcatcatcattgacgatgcggcggaggtagcgcggctgatgaagaaagcgatgccgcaagtgaaagagaatcgccgcgatactggcgacgcctatagttttaactggtcgatgcgtattgcaccggatctgcaggtgccgtttgagccgtcgcatgagaatatggccaacctgaaactgtacccggatcagccggttgagattctggcggcggatctgcggcgcgccttctccggtattgtcgcggggaacgtgaaggaggtcgggatacgcgccattgaagctaatggtccgtataaaattcacggcgatcgagagatgatgcgtcgcatggacgatctgctgcagggattcgtcgcgcagcatcgtatgaaattgccgggttccgcctacatcccctgttacgagatctgcgcttaacgcttatgcccggttgccgccagcagccgggcgcttctcccattcctttcattgcggtatggcgattcacgtatgccttcattttttatgatgatcatcagaggcatagcccgcattgttttataaacaccatttataattcaccataaatagattgccaggcaaacgtttacctgactcctcttaccgtgatttatcggttcaaactctcattcttcgcaagaatccactaaaaaccttgatttttatagtcaaacctccgtatcttgcgccccaatctttccggccttatatcgttaatggtagccttcgcgcccggaaattcgttatgacgtttttttaatagattaatggtccaaatttatccatgtaagaagcggattattgcatttgagatcgggatcactgatagattcatcacttaaatgtatctttccgcccgaaaattattacggcgaaaaattatataaaaagcgtccctaagcagatttcattttacgatcaggtcttttttcattggattagaccagcaacctgatttttagcatcctccaggagaaatagatggaaaccactcagaccagcactattgcttcgattgactctcgaagcgcatggcgcaaaacggataccatgtggatgctgggcctttacggcacggctatcggcgcgggcgttctgttcctgccgatcaacgcaggcgtcggcggcatgattccgctcatcatcatggcgattctcgctttcccgatgacctttttcgcacaccgtggcttaacacgcttcgtgctgtccggtaaaaacccgggtgaagacatcactgaagtcgttgaggaacacttcggtatcggcgcaggtaaactgattaccctgctctacttcttcgcgatttaccccatcctgctggtttacagcgtggcgattactaataccgtggaaagcttcctgacccaccagttagcgattaatccgccgccgcgggcgattctttccctgatcctgattgttggcatgatgaccatcgtgcgcttcggcgagcaaatgatcgttaaggcgatgagtatcctggtattcccgttcgtcgctgcgctgatgctgctggccttgtacctgatcccgcagtggaacggcgcggcgctggaaactctgtcctttgattccgccgcgtctaccggtaacggtctgtggatgacgctgtggctggcgattccggtgatggttttctctttcaaccactccccgatcatctcctccttcgcggttgcgaagcgtgaagagtacggtgaaggcgcagagaagaaatgttctaaaattctggccttcgcccacatcatgatggtgctgaccgtgatgttcttcgtcttcagctgcgtgctgagcctgacgccggcagatctggcagcggcaaaagagcagaacatctctattctgtcttacctggcgaaccattttaacgcgccgatcatcgcctggatggcgccgatcattgcgatgattgctatcaccaaatccttcctcggccactacctgggcgcgcgtgaaggctttaacgggatggtgattaaatcgctgcgtggtaaaggtaaatccatcgaaatcaacaaactgaataaaattaccgcgctgttcatgctggtcaccacctggattgtggcgacgctgaaccccagcatcctgggcatgattgaaaccctgggcggcccgatcatcgcgatgattctgttcctgatgccgatgtatgccatccagaaagtaccggcaatgcgtaagtacagcggtcatatcagcaacgtattcgttgtgattatgggcctgattgccatctccgctattttctactcactgttcagctaagtcctttagcgccgcttaccgcggcgcttctctatgatacaaccgcaatggatgccctatgattagcgtattcgatatttttaaaatcggcattggcccttccagttctcacaccgtcggaccaatgaaagcaggcaagcagttcacggacgatctgattgcccgccatatccttacagatgtcacccgcgtcgtggtggatgtctacggctctctgtcattgacgggtaaaggccaccacactgatatcgccattattatgggcctggcggggaatctgccggacaccgtcgatatcgacgccattccgtcctttatccaggatgtgaacacccatgggcgtttactactggctaatgggcagcatgaagtcgaatttccggtcgataagtgcatgaatttccacgccgacaacctgtctctgcatgagaacgggatgcgtattaccgcgctggcgggcgataaggtgctctacagccaaacctactactccatcggcggcggctttatcgtcgatgaagagcactttggtttgacgaatagcgaacccgttaacgtaccgtacccttacaaaaccgccgcggatttacagcgccactgccaggagacgggtttgtcgctctccggtctgatgatgcaaaacgaactggctctgcacagtaaagaagcgctggagcagcacttcgccagggtctgggaggtaatgcgcagcggtattgagcgcggtatcaccaccgagggcgtattgccgggcaaactgcgcgttccgcgtcgcgcggcggcgctgcgtcgggtgctggtcagtcaggataagaccaccaccgatccgatggcggtcgtcgactggatcaatatgttcgcgctggcggtgaacgaagagaatgccgcaggcggacgagtagtcactgcgccgactaacggcgcatgtggtattgtgccggcggtgctggcgtactatgacaagtttatccgcgaagtaaatgctaactcacttgctcgctatatgctggtcgccagcgcgattggctcgctgtataagatgaacgcctctatttccggcgccgaagtgggttgtcagggagaggtcggcgtggcctgttccatggcggcagcgggtctggccgagctgctgggcggtagtccggcgcaggtgtgtatcgccgcagaaatcgccatggagcataatctggggttaacttgcgatccggttgccggtcaggtacaggttccctgcattgagcgtaacgcgattgcttcagtcaaagcggtcaacgccgcgcgtatggcgctgcgccgtaccagcgaaccgcgtgtatgcctcgataaagtgattgagaccatgtacgaaaccggtaaagacatgaacgctaagtaccgcgaaacttcgcgcggcggcctggcgatgaagatcgttacctgcgattaattctcagcacattttaggatctgtaggccggataaggcgctcgccgccatccggctttgttgcctgatgtcgcttcgcttatcaggcctacggatagcgctatttcgcaatgctcgcctccccccgccgtgaatgttaccctacgcgcaggtttgtaagggagaacaccgtggctgctcatctgcttatcgtcgacgcgctcaatttgattcgccgtattcacgccgttcagggatcgccctgtgtggaaacctgccaacacgcgctcgatcaattgattatccacagccagccaacccatgccgtagcggtatttgatgacgacgcgcgcagcagcggctggcgtcatcagcgtttaccggactacaaagcaggacgtccgccgatgcctgacgatttacataatgaaatgcccgccctacgcgccgcatttgaacagcgcggcatacgctgttgggcatcagacggtaacgaagcggacgatctggcggcgacgctggcgctaaaagttaccgaagccggacaccaggcaaccattgtgtcaaccgataaaggctattgccagttgctctctccgggattgcgcattcgcgactacttccagaaacgctggctggacgcgccgtttattgaaaaagagtttggcgtacttccccggcagttgccggattactggggtctggcaggaatcagcagttcgaaagtccccggcgttgccggtatcggccccaaaagcgcgacccagctgttgattcagtttcaaaatctggagggaatttacgcccatctggacgaggtgccggaaaagtggcgcaaaaagcttgagacgcataaagaaatggcatttctttgccgcgatattgcacgtctgcaaaccgatttacatatcgacggaaacttacagcagctacggctggcgcggtagttttgttgccggatggcggcgtgaacgccttatcctgcctacaggactgcacgaaatgtagagcggataagcgcagcgccatccggcaaaattaccaggcgatatgatacagttcgacaatgtccgccagactcgcttcacgcggattgccgcccgtacagacatcatcgaacgccgcctgcgccagcgccgggatatcctcttttcgaacgccgacatcacgcaaatgcagcggaattcccacatcgcgatttagcgtaaatacggcttccactgcggcattacgtgcctcttcaagactcaatccttctaccttcacccccatcgcccgggcgatatcacggaatttctcgttggtagacccggcattaaaacgcatcacatgcggaagcaaaatagcattcgcgacgccatgcggcgtgttgtaaaacgcgcccagcggatgcgccatcccatgcaccagccccagccccacattggaaaaccccatcccggcaacatattgccccagcgccatcgcctcaccggcctctttttctccggccacggcgccgcgcagcgcgccagcaataatctcaatggctttgatatgtaatgcatccgtcagcgcccatgcggcccgggtaatatagccttcaatagcatgggttagcgcatccacgcccgttgccgctttcagcgcgggcggcataccgtccatcatatcggcatcgataaatgccgcctgcggaatatcatgcggatcgacacaaacgaatttgcgccgtttctcttcatcggtaatcacataattgatagtgacttccgccgcggttcccgccgttgtcgggatcgccataatcggcacgctgggtttacgggtcggcgatagcccttccagactgcgcacatcggcaaattccggattgttactgataataccgatcgctttgcaggtatcctgcggagaaccgccgccaatggcgatgagatagtccgcgccgctttgggtaaagaccttaagcccttcctggacaacggaaatcgtaggattagggatcacgccagcatagatctcccacgccagccctgcggcatccattctgcttgtcactttatcgaccacaccgcattgcaccagcgttttatcggtaacaatcagcgctttatgataaccgcggcgcgtcacctcatcggttaatgcgtccaccgctccccggccaaaccatgccgtttcattcagaatcattctgttcgccatcgcctgtctcctgacatcactcttcaatacgtaatccgtaagttttaaatttctccagtacgatagcgatcgcctcgtcatccagtaccggtaccggatcgacaatggccagcgtacttaaatagagctgcgccagcacttccacttcatgcgccagccacaacgctttgtctaaattttcttcacaagcgataagcccgtgatgctgtaacagcgtcgctttacgatttttaagcgccacggcaacatggtcagaaagttcgcgggtgccaaaagtggcgtagggcgcgcagggaatagagtttcctcctgcggcggcaatcatgtagtgaatcgccggaatcgggcgattcaggatcgagactgccgtacaatggacagcgtggttatgtaccacggcattggcgtcagggcgcgtctggtatgccgccatatgaaaacgccactcgctggaaggcagcttgccctgctcatgctgaccgtcagcatcaataaagacaatgtgcgactctgtcagcttctcgtaggggatccccgtcggcgtaatcagcaatccgccctgataacgtacgctcacgttacctgccgtcccctgatttaaccctaaccgcgtcatttccagacaggtatcaataatctgccgcgccagtctatttcgttccattatttacctctctctgtgattcaaaatgagacaacaaaaccgcctttcgcatcgcgctgctgtcctgttgaaataatcgaatagttagcaactatcatcatactgaataaagagaagggaatttaaataacgatattttgtgattcacatcaattaattcgccacgataaaccagacgactaccgtttctctcgccgataaatgcccgctcttaataatattttttaaaacgggcaaagatgaagaataagttactactgcccgttttcgtggcaataatttaattcgggcattcagtctgtggttttttaaattaaacatctcaaacggtcatttttttatgaaaattaaagtgatgataatcacagaacgctctgctctcaggtataaatgtgaccgccatcatattaaaaggccttttttatttgaaaatgactccatgagttcattccggacgccaatttattaccggtaagaaaagcgaactcacctaattttacggtctggtgaccagaaccgaccgcacgcaaaagcttctgaaccgatgaggatgctatgggaaacacaacaatacaaacacagagttttcgtgctgtggatgcagagcaaagcaaaagcaagcgctacattattccattcgccttactttgctcgctattttttctgtgggccgtcgccaataatctgaatgacattttattaccgcagtttcaacaagcttttacgctaactaacttccaggccggacttattcagtcagccttttatttcggttatttcgtcattccaattcccgctgggattttgatgaaaaagctcagttataaagcagggattatcaccgggctttttttgtatgctgttggcgccgcattattctggcctgccgccgagataatgaattacacattatttttaattggcctgtttatcatcgccgccggtttaggctgccttgaaactgcggccaatccttttgttacggtattaggtccagaaagcggcggacatttccggcttaatctggcgcaaacttttaactcctttggcgctattatcgccgttgtgtttgggcaaagccttattttgtctaacgtgccgcatcaatcacaagaagcgcttgataaaatgacgccggatcagcttagcgcctataaacacagcctggtgttatcggtacaaacgccatacatgattatcgtcgccatcgtattagtagttgcgctgctgattatgctgaccaaatttccggccctgcaaagtgacgatcatagcgatgctaaacaaagctctttcttatcttctctctcccgactcatccgtattcgccactggcgctgggcggtgctggcgcagttctgctacgtgggggcgcaaaccgcctgctggagctatctgatccgctacgccattgaggagattcctggaatgacgcccggtttcgccgccaactacctgaccggcacgatggtgtgcttctttatcggccgtttcaccgggacctggcttatcagccgcttcgcgccgcataaagtgctggccgcctacgccctgtttgccatgctcctgtgtctgatttccgcctttagcggcggacatatcggcctgctggcgctgacgttgtgtagcgcatttatgtcaatccagtacccgaccatcttctcgttgggtatcaaaaatctgggacaggacactaagtacggctcgtcttttatcgtcatgaccattattggcggcggtattgtcacgccagtaatgggcttcgttagcgacgccgcaggcaaaatcccgaccgccgaactggttccggcattgtgctttgccgtcatcttcatttttgcccgtttccgttcacaagcggcgacaaactgaacatttatccgaataacgtgaggaatctgtcatgaaaaaaatcagcttaccgaaaatcggtatccgcccggtgattgatggacgtcgtatgggcgtacgcgagtcgctcgaagagcaaaccatgaacatggcgaaagcgacggcggcgctcatcaccgagaaaatgcgccacgcctgtggggcacaagtggagtgcgtcattgcggatacctgtattgccggaatggcggaatccgccgcctgtgaagaaaaattcagtagccagaacgtgggcgtgaccattaccgttacgccgtgctggtgctatggcagcgaaaccattgatatggacccgatgcgtccaaaagccatctggggctttaacggcacagagcgtcctggggcggtttaccttgccgcggcgctggcggcgcacagccagaaaggcattccagcgttctccatttatggccatgacgtgcaggatgccgacgatacctccattcctgccgacgtcgaagaaaaactgctgcgttttgcgcgggcagggttagcggtagccagcatgaaaggcaaaagctacctctccgtcggcggcgtgtcgatggggatcgcgggttccattgtcgatcataacttctttgaatcctggctgggcatgaaggtgcaagcggtagatatgaccgaactgcgccgccgtatcgatcaaaaaatttatgatgaggccgaactggagatggcgctggcgtgggcggataaaaacttccgctacggcgaagatcagaacgcctcgcagtataagcgcaatgaagcccagaaccgcgcggtgttaaaagagagcctgctgatggcgatgtgtattcgcgatatgatgcagggcaacaagacgctggcggacaaagggttagttgaagaatcgctgggctacaacgccattgccgccggcttccagggccagcgccactggaccgatcaatacccgaacggcgataccgccgaagcgctgctcaatagttcttttgactggaacggcgtacgcgaaccgtttgtcgtcgccaccgaaaatgacagtctgaacggcgtagcgatgctgttcggtcatcaactcactggtaccgcgcagatattcgccgacgtgcgaacctactggtcgccggaagccgtagaacgcgtcaccggccaggcgctcagcggcctggcggaacacggcattattcacctgattaattccggttctgccgctctggacggtgcctgtaaacagcgcgacagcgaaggcaagccgaccatgaaaccgcactgggaaatcagccaacaagaggcggatgcgtgtctggcggccaccgaatggtgcccggcgattcacgaatacttccgcggcggcggctactcatcccgttttctgaccgaaggcggcgtgccattcaccatgactcgcgtgaatatcatcaaaggcctgggaccagtactgcaaatcgccgagggctggagcgtcgaactgccgaaagcgatgcacgatcagcttgatgcccgcaccaactctacctggcctaccacctggtttgcgccgcgtcttaccggcaaaggcccgtttaccgatgtctattcggtgatggcgaactggggcgctaaccacggcgtactcaccatcggccatgtaggggcagactttattactctcgccgcgatgctgcgtatcccggtatgtatgcacaacgtggaggaggcgaagatctaccgtccttccgcctgggcggctcacggtatggatatcgaaggccaggattatcgcgcctgccaaaattatggcccgctgtataaacgttaatgcggcttagcccggtggcgcaggcttaccgggcctacgggcgcgtgaaccgtaggccggataagcgtagcgccatcgggcggcgtttatggagttatctatgaaacaagacgttatcctggttctcgactgcggtgcgactaacgttcgggcgatcgccgttgatcgccaggggaaaattgtcgcccgcgcctcaaccgctaacgccagcgacattgccgcagaaaatagcgcctggcatcagtggtcgctggacgccatcctgcaacgtttcgccgactgctgcaggtcactctccagcgccctgtcggagtgtgttgttcgcggtattacggtgactacgttcggcgtcgatggcgcgctggtcgatgcgcagggtaagctgctctacccggtcatcagttggaaatgcccgcgaaccgccgccgtgatggaaacgattgagcgctttatctcgccccggcaattgcagacgctctccggcgtcggcgcgttcagctttaacacgctgtataaactggtctggcttaaagagaatcatccgcgcctgctggaacaagctcactgctggctgtttatctcgtcgctgattaaccaccgtctgaccggcgagtttacaaccgatatcactatggcaggcaccagccagctactggatatccatcagcgcgactttagtccggaaatcctgcaggcgacgggcctggcgcgccgcctgttcccgcgtatcgtggaagcaggcgcccagataggcacgctacagacagacgcggccaggctactcggtctcccggcgggtgtgccggtgatctctgccggacacgatactcagttcgcgttattcggcgctggcgcgcagcaaggtgaaccggtgctctcctccggaacatgggagattctgatggtacgcagcggtcaggtggatacctcgctgctcagtcagtatccgggctcgacctgtgaactggacagtcagtcggggctttataaccccggaatgcagtggctggcctccggtgtactcgaatgggtacgaaaactgctgtggacgccggaaacaccatggcaaacgctgatcgacgaagcgcgcgctatttccgctggcgcggaaggcgtacggatgcagtgcgatctgctcgcctgccaaaatgcaggctggcagggcgtgacgctcaataccacccgcggccatttctatcgcgccgcgctggaaggcctgacggcgcaactgcagcgtaatctgcgcacgctggagaaaatcggtcattttaacgccacagaactgttactggttggcggcggcagtcgcaacgctttgtggaatcaaattaaagcgaatcagcttgatatccctatcaaagtgctggacgacgcggaaacaaccgtggccggcgctgccatgtttggctggtacggcgtaggcgaatttagtagcccggaacaggcgcgcgcgcaggtcaattatcagtatcgctatttctggccgcaaaccgaacctgaaattattgagggagtatgaaatgctaaaaaccatttcaccgttaatttccccgacactgctcaaagtgctggccgagatgggccacggggacgaaatcattttttccgacgctcactttcccgcgcatagcctgggcccacaggtgattcgcgccgatggtcttagcgtcagcgatctactgcgggcaattattccgctctttgagctggatagctacgccccgccgctggtaatgatggccgccgtggaaggcgacacgctcgaccccagcgttgaagcgcgctatcgcgatgctttgtcattagaagcgccgtgcccggatatcgttcgtatcgaccgttatgcgttttatgagcgggcgcaaaaagcgtttgcgatcgttatcacaggtgagtgcgcgaagtacggaaatattcttttaaaaaaaggggtaacgccgtaatctcttgccggtgcgcccgcatgacgcgggcgttcatcgaatgatggggtgagaaaaatgaaagcggcacgccaacaagcgatagtcgatctgctgatcaatcataaaagtctgaccaccgaagcgctggccacccggcttaacgtcagtaaagagaccatccgccgcgatctcagtgaactacagacgcagggaaaagtgctgcgtaatcacggacgagctaaatatattcatcgtgaaaatcaggacagcggcgatccattccatatccgcctgaaaagccattatgcgcacaaagccgatattgcccgtgaagcgttagcgtggatagaagaaggaatgacgattgcgctggatgccagttcaacctgctggtatctggcccgccagttgccggatattcccattcaggtttttaccaatagccatcctatctgtcaggagctgggaaaacgcgaacgcattacgctgataagttccggcggccagcttgaacgtaaatatggctgttatgttaatccgtcgcttatctcacagctaaaatcgcttgatatcgatctgttcatcttttcctgtgaggggatcgacggcggcggcgatctgtgggactccaatgcgatcaacgccgattttaaatctatcctgctcaggcgtgcctcgcaggctttattattgattgataaaagtaaatttaatcgttcaggagaggcgcgcatcggccatctggatgacgtgacgcatattgtttcagatgcgccgcagtcataggccggataagcgtgcgtcatccggcgctgatgacgcgccggatgacggcagcgcgtttttatcgctcgtcgcgacgcccgccaacagccgcccacaaccgacgcacgtgtaccgtcacttcttcgcgatcgtgataaagctgacgcgcctggatctgcgcattaacgccatgctcatccaactgcgcctgaagatacgccaggttatgcgatacctcttcatagcgttttttcatcggcagtttaaggttaaaaatcgtctcccggcaccagccgttcaccagccactgcgccattaacgcggtgactttggccggcttctccaccatatcgcagaccatccatgaaatattattccggttcggacggtacctgaagccatcctcacgcaaccaggtcacctgtccggtgtccatcaggctttgcgccatcgggccgttatctacggagtaaacccacatattgcgcttcactaactggtacgtccatccgccgggacaggcgcccaaatccaccgcatacatgccgttcgccagacgttcatcccactcatcttccgggatgaaaacgtggagcgcctcttccagtttcagcgttgagcggctcggcgcatcagacggaaacttcaaacgcgggatgcccatataaaacggtgaattgttatgcgcgaacgaataaccggtatagcagcatcctggcgcgataaaaaagacatgaacgaccggacgcttcggcgtttcataattcgtcaatacgcccgcatcacgcaaagccgcgcgcagcggcaccgtaaatttgcggcagaacttcatcagttctttactttcattggtgtcggcgacttcaactcgcagctcgccgcccttttccactacgccctgcaacatgccgacaatcggcgtaattctgtcttccggcggtaaatgttgcagcagttcacccaccacaaaccactggcgggcgaaaatcagcgaactgaacggcagctctgaaatcagcttttcgccatcttccggctggtagcattcataaatgacatagcctgcgttctcttttacgcgtgcaaaaccaaatatttcccgttttcccgctttatcggtaatttctgcagcgcactctttttcaaaccccggacggcagagcaatacaactttattcatggctcgcgcccttacgtttcatacgaatggcgccaatcagcaatagcgcccagcccaccaggaaactgacgccgccgacaggcgtgatatacgcccacaggcgcagatgcgaaagcgcaaggcagtacagactgccgctaaacagcaccgtgcccagcgccagaaaaacgctgctccagtaaaaccagatgctgatacggcgctgcatcgccaccgccaggccaaagatcgccagcgtatggaacgcctgatattgcaggccggtctgaatccagcccatttcaaccacgcccagggttttactcaaaacatgcgccccgaacgcgcccagagcaacgtaaataaaaccgctgatagcggcgacaatcagcataaaacggctggtcatggtcataccctaagttaattattgttcgtaacgaaaacggaatttttcttgctccgtcgccgccttcgccaaaatccactgacggaaggcggctattttacccagttctgcctggctgtcatgacaaaccagataaaaagcattcttactcaccagaacatcgttaaatggacacaccagtcgcccggcttcaatttccgactgagccataacattattcgccagcgcgatcccctgtccgtgaatagcggcctgtagcaccatcgcgctgtggctaaatatcggcccttgctgaacgttaatatggttgagccctaactgacgagtataggcctgccagtcacgccgggaggcatcgtgcaataacgtgtgtttcgccagatcttccggcgtttttaacggtttttcgcctgtgagtaataaaggagaacagacgggcagtaaatattctgcgtataatttttcgacgcgcaagcccggccagtttccccggccataaaaaatcgcgacatcgacatcgtctgccagtttatcttcctgacggtcaacggcttgtatccgaacgtcaattcccggataagctgagttaaagctggagagcctgggcaccagccattggatggcaaaactgggcggtaaactcaccgtcagcgcccctttggcactgcgcgcctggagcttacgcgttgcttccgtgagctgggaaaatatctctttaatgtcgagaaaatagctttggccttcttccgtcagtagcagcgaacgattgcggcggcggaacagttttagccccaaaaaatcctcaagtgacttaatttggtggcttactgcggcctgcgtcacaaaaagttcttccgctgctcgcgtaaagctcaaatggcgcgcggcagcatcaaaaacgcgtaacgcatttaaaggaggtaatcgttttgacatggcctctggacttaatgtcgaatgaatttaacaaataggtaacaatatgtaacctattagtttttttaatctgagacattataaattgtccgttgaggttctaccagcaaatacctatagtggcggcacttcctgagccggaacgaaaagttttatcggaatgcgtgttctgatgggcttttggcttacggttgtgatgttgtgttgttgtgtttgcaattggtctgcgattcagaccacggtagcgagactaccctttttcacttcctgtacatttaccctgtctgtccatagtgattaatgtagcaccgccatattgcggtgcttttttttgtataacaaacggttagttttccagagccaccatctctttcacgtcagtacgattgatctgctgtttgttgccattagcgtctttatacgaaatcataccggtatcgttatcggtctggggtttaccgtcggtcacaatgctacgtccatcattggtgtgcataacgtaattaggaccggaacaggcgctcagggcaaaagtcagcatacatgcagagataattgcggcagtctttttcatcttcttctccttaaagctgtttgtgctatttaaagcggactccgtaacaggcttaaacattcgcctaacattattcagcataacctcctttacataattcgccaggatatacagacgattccgatggttaggacaaaccttgtatcagccgcgcttttacgccacgatcggtaaactgaaccgaggaatatcatgaacgcttttaatcccacgcagtttcgcgcgcagtttcccgcgctagccgatgcgggtgtttatctcgatagcgccgccacggcattaaagccacaggcagtcattgacgccacgcaccagttttattgtttgagcgccggtaacgttcatcgtagccagtttgcgcaggcgcagcgcctgacggcgcaatatgaagcggccagagcaaaagcagcgcggctgttaaacgcgcccgatgaaaaaagtatcgtctggacacgcggcaccaccgaagcgatcaacatggtggcgcagtgttacgcccgtcctcgtctgcgccccggcgatgaaattatcgttagcgtcgccgagcatcacgccaaccttgtgccctggctgatggtggcgcaacaaaccggcgcgcaggtcataaaactgccgcttaatgaccgacgtcttcctgatgttgagcgtctgccggaactgatcacgtcgcgcagccggattctggcgctggggcaaatgtcgaacgtaacgggcggctgcccggatctcgcaagcgctatcagcaccgctcacgcagcgggaatggtcgtgatggtagatggcgcgcaaggcgcggtacacttcccggcggatgtccagcagcttgatatcgatttttatgctttttccgctcacaaactgtatggcccgaccggtatcggcgtgctgtacggtaagccggagcttcttgaggcgatgtcgccctggctcggcggcggcaagatgatccgtgacgttagctttgaaggcttcaccactcaaagcgctccctggaagctggaagcggggacgccgaacgtcgccggggtcatcggcctgagcgctgcgctggaatggctgtccgatatcgatattgaacaggccgaaaactggagccgggggttggcgacgctggcggaagacgcactggcgaaacgtccgggctttcgttcgttccgctgccaggactccagcctgctggcctttgattttgtcggcgtgcaccacggcgatatggtgacgctgctggcggaatacggtattgcgctccgggccgggcaacattgcgcccagccattgctggcggaacttggcgtcacagggactctgcgcgcctcttttgcgccgtataatacccaacatgatgtggatgcgttggttaacgccgttgaccgcgcgctggaactgctggtggattaatgacaaaccctctttataccggacacccgttcggcacaacggtaacggaagagacgttacgcgctatctttctcccgctgacccagtgggaggataaatatcgtcagttgattctgttaggaaaacagctccccgctctgccggatgaatgcaaagcgcaggcgaaagagatagccggctgcgagaaccgcgtctggctgggctttacccagtcagataacggaacgatgcactttttcggcgacagtgaggggcggattgcccgcggcctgctggcggtattgctcaccgcagtggaaggaaaaaacgccgccgaattacaggctcgttcaccgctggcgctgtttgatgagctgggtttacgcgcccagcttagcgcctcacgcagtcaggggctgaacgcgctgagcgaagcgattgttgccgcaacgcataagggttgaaatagcgtaaatattctgtcgcctgacagcgccgtccgcggcggtcaggcgatgcagataaaataatccagtcactttattagtttcggcgtcagatttccctgataaacattcttttgatttttatcagctatcacaatgaaattacaatgttagaatccatgttaaaacggcgtgaagattttagagtaaataaagccactcgatgtagcgtagcaggagaactggaaaattcatacgcatcgggtgaagttataacaggatatggataagtggaaaaatatctgcgtaacggtaccatgtttgtggtgctggcatttatattatgggggttaacacctttatactatcaatatttatcaggggggaacctcgcacaaatattgatataccgggtattctggtcaattccattattactggcagtaaggttcttatttcggcagcgaacgcgatttcatgatgtctggaaagataaaaaatcctttttcttctgcatgatcgccggacttttgatgattgtatcatggtcatcttttatttatgcgctaacccatcatctggtgcttgatgccagcctcggctattttatcaacccgctatttgttattgcgctgggatgcatttttcttaaagaaaaactgtcgttgtttcaggccatcgccgttttttccggtgtctgcggcctgacttttcaaattatcatgctacggcatttcccggcgctggcgctaaccatgggattatcatttgcgctatatggcctggcgcgaaagtttatacattatgatgtgatgacatcgataacgattgaaacattatgggcattgcctgtctcactattaatttttctctttagcgatactggaccaattatatccgctaatactcctttctttttgtatgtcatgacggcgccagtgacgatcattccactggtattatttgccatcgcgttaaatcacacctcgttgattgtcaccggactggcgcaatatatagagccgtctttacagttcttacttgccattatgatatttggcgagcacattaattacgcggaactgctctgcttttgtgcagtatggttcgggttgtttctatgcatatctgaaaatttatattcccattatctccgcgcccgtctgaaaccggtgttcggcagggtacagcgcttctttcgctaacgaagggcgcagggccggatacgcgtctgcgtgacactccgccccgtccttttattcttgtcgcgccgctttagccatgatcttcttcagcgcatgggaaacggcgacaaaaccgaacgttgccgtcaccatcgtcgccgcgccgaagccagaggcgcaatccatccgttttggcccttctgcggtagctttcatcgcgcatacggaaccgtccgcctgtgggtaaaccagcgcttcggtggaaaaaacacagtccacgcccagtttacctttactgttcttcactacgccaaaattatgtttcaatctctcacgcagttttgccgccagcggatcctggatagttttcgccaaatcagcgacctggatttgcgtcggatcgatctgcccgcccgcgccgcctgtggtcactaaaggaaccttatatcggcgacagtacgcaatcagcgcggcttttggacgaacgctgtcaatggcgtcaatgacataggtaaaacccgcgttcatataacccgccacattatccggcgtgatgaaatcatcgataaccgttacccggcactccgggttaatttgccgaatccgttcggccatcacttccgctttcgccaacccgacgttatcacgcaacgcatggatctgacggttcgtattggtcacgcagacatcgtccatatcaatcagcgtaatcgcgccgatgcccgtacgcgccagcgcctctgccgcccatgatcccaccccgccgattcccacgacgcagatatgcgcctcagcaaaccgctgcagcgctttttcaccgtacagacgcgcggtgccgccaaagcgttggcgccaggcatcacttatcaccactgacatatgacctcagaataaaaaaaggtgaggttattcctcacccctgctcactattttcaggcccgatagcgatcgcgttatcgggcaatccggttgtcgcagaataccacaatcagccgctaaacacgttaccggcgcccggcgcgctttttaacacccagacgcgaccatagtgattataccatccggcacgatgcccggcatccgggccaattccctggtaaatatcaaagtgctggcctttaatcgctccgccgacatccagtgcgaccatcaaacgtagctcatactgaccgctaaatttaccgttgttatccagcaacggtacttccgccaacaaggtcgtgccaggcggaatgatgctgcggtcggaggcgacggatgctcgcccaatcagcggtacagcgctggcgcctttgaccggcgcaaaagattgcggcttaaagaagacgaacgacgggttctgctccagtaattcacgcacttccgcttcgctgtgcttctctccccattcgcgtatagcctgcatcgacatatcttcttttttcacttcaccgcgatcgataagcactttaccaatactgcgataaggccagccgtttttaccggcataactaaagaagttcagcggactaccgtcaccgaaatcaatataaccgctgccctggacatccataataaagttatccatcagcgaattactccaggccaggatgtacttatcgctcagcgcgcctgcgtagatctgagcgcgggacggtaagcgtccgcgttttggcggcatactatagataggatactggaacgcgccctggcgcgtatggcgagcctgaacgacgggcgtatagtagcccgtgaactggacgttaccgtagttgtcggtgccttccatctgccaggcatcgataccaaactgacgcatagtgcgcgtatcgcctccggaacgtaaccagttctggacagcgttatagacgttgctttgattggtgtataaacgcggcgacgcggaacggatctggttgacctgctcggcaaagtctccagcattaatcggcgcgcccactgcgtccggctggtttaccagggagaagggctgggtaaatttcccgtccttatattgctgaccgcgatcggtcggttttgatgaacaggcagccagcattgccagcattacgcctgtcgccacatattttgcccaacgtcctttcatggtgtctcgtcttctgcgtaatcgaaagtgcccggtgaagataacaaaccgtccgaagtaatgaaatgcgatcgcgatctcattatgtaaattcgtttaaaaatcgtgctatctgcggtgtatttgcgcaattcatgagaaattagcgatttatatgaaaaaagggttgcaacaaaagctcagcggagtatagtgcgcatccacggacgcggggtggagcagcctggtagctcgtcgggctcataacccgaaggtcgtcggttcaaatccggcccccgcaaccaattacaatgagaatgcaagtttagacggacgcggggtggagcagcctggtagctcgtcgggctcataacccgaaggtcgtcggttcaaatccggcccccgcaaccaacttaatgaacacccttacgggtgtttttttgtatctgtcgtctggtccgcaacgacagtgcgggcagcatcctacttacccgcgcaataaactcgccgtcatctcaggttaacttcttctcgccagcgtcgccccatcggcaaaatacgctttaatgcccgccagaatcgactctgcgacctgttgctggaacgtcgcggtcttgagcttgcgttcttcttcaatgttactgataaacgccgtctcgaccagaatagacggaatatcgggcgcctttaacaccgcaaaccccgcctgctcgaccttgtttttatgcaggtcattaattttaccaagctgcttcaacaccgctttaccgaatttcaaactatcggcaatggtcagcgattgcaccatatcgaacatcgtatggtcgacataacggtcaccgcttttgctcacgccgccaattaagtccgaggcgttctgcgtttgcgccagatatttcgccgcggtactggtggcgcctttggtcgatagcgcgaatacggatgaaccgctaggctgccggctggtgaaggcatccgcatgaatagagacaaacaggtcggcgcgctgtttctgcgctttcgccacccggacttttaacggaatgaagatgtcttcattgcgcgtcatatagaccttcatgttgccttctttttcgatcaacgcgcgcaggcggcgggctatctggagcaccacgtctttttcacgcgttttgtatttgcctatcgcgccggggtcttcgccgccgtgtcccggatcaagcataatgacaatgggacgatcgcgccccgctttaccgggctgcggcccgctttgcgaaggcggcacctgtttatccagatcgcctttattgtagtcttccagcagcgccagcagcggatcctgcatatcctgcgcattggcaggataaagatccatcaccagacgttctttaaagcctgccacaggcgccagcgcaaatagctgcggcttcacgttttgttttagctcaaagaccatacgcacagtcttaggatcaaactgccctacccttgcggatttgatatacggatcgtcgctgcgaatctgcgcgccaatgcctttaagcaccgagttcagattcacatcctcaatatctactaccacgcggtccgggttacttaaggcaaattgtttatatttcagcagacgattcgactctaccgtgacgcgggtatagctggacgcaggccagatacgcaccgcaacgacctggcttacggcagccagcccgacctggctcacgcttaatagccacatggcgcccgcgccttgtagtaaacggcgacggctgattgctgaattggctcccgacatgcttctcccgagcaaaaactaaatagagatcatacaaagttcatccaaattgaccggaaactttagcgaatgacgcataatctgtcatctataaaagggtaaacattctttttatattcacggcattactaagaaaagcgatcggaccgcataaaatttacgcttgcacagagggcaaaaacagaataaaaatacactaatttcgaataataattcactagtggggcgcgcaatgataaaggaacgtaaaaccgaactggtagaagggtttcgccattcagttccctatatcaacacccatcgcggaaaaacctttgtcattatgctcggcggcgaagccattgagcatgacaatttttccagcatcgttagcgatatcgggctactgcatagcctcggtattcgccttgtcgtggtgtatggcgcgcgaccgcaaatcgacgccaatctggccgcgcatcatcatgaaccgatttaccacaaaaacacgcgggtgacggacgccaaagcactggagctggtgaaacaggccgccggtttactccagcttgatattaccgcccgtctgtcgatgagtctgaacaatacgccgttgcagggcgcgcacattaatgtcgtcagcggcaatttcaccattgcgcagccgctgggcgttgatgatggcgtggactactgtcatagcggccgtatccggcgcattgatgaagatgcgatcaaccgccagttggataacggcgcgatcgttctgatggggccggtcgccgtctcagtgaccggcgaaagttttaatctgacctcagaagagattgccactcaactcgccgttaaactgaaagcggaaaaaatgatcggtttctgttcttctcagggcgttaccaatagcgagggcggcatcatttctgaactcttcccgaatgaagcacaggcgcgggtggaagagttggaagcgcagggcgattacaactccggaaccgtacgttttttgcgcggcgcggtaaaagcctgtcgtagcggcgttcgtcgttgccatctgatcagctatcaggaagatggctcgctattacaggaattgttctcgcgtgacggtatcggtacgcagatcgtcatggagagcgccgagcagatccgccgcgctaccatcaacgatattggcggtattctggagcttatccgcccactggaacagcagggcattctggtacgccgttcccgtgaacaactggagatggagatcgataaatttaccattattcagcgcgataatatgactatcgcctgcgcggcgctgtatccttttgtggaagagaaaataggcgaaatggcctgcgtagcggtacatccggattaccgcagctcatcgcgtggagaagtgcttctggagcgggttgccgcccaggcgcggcaaatggggctgcgtaaattgtttgtgctgacgacgcgcagtattcactggttccaggagcgcggtttcacgcctgtcgatattgagttactgcctgagagcaagaaaaaaatgtataactatcagcgacgttcaaaggtgctgatggcggatttagggtaacgagggaggcctgatggcgctgcgcttatcaggcctacgctcgaaagcatcatttggaggccggataagacgctacgcgtcgccatccggcgagaactcgtcttatccggtacgactgacttcatcaaataaggtggctagcccgctgcgccgctccgtacgcgtcacaatcgcgcctgccaggatccgttcatcggcatacagcgataaccgccgccgcgctcgcgtaacagcggtatacaccagctcccgcgtcacgaccggcgaacgctggctgggtaaaatcagcgcggcgtgatcaaattcagacccctgtgatttatgtaccgtcatcgcccaggttgtatcatgttccggcagacggctgggctgaacggacttgatcgtgccgtccggcatcacaaaccagacgcgtaacccctgcccgcgatcgagcgcaataccaatatcgccgttaaatagccccaacgcgctatcgttgcgcgcaatcattaccggacgcccttcgtaccagcgagaatgcgggtgccgctgaatttttcgttgctgcaccatcgcctgctcaatgcggtcattcaatcccctcacgccaaatgggccttcgcgcagcgcacaaagcagttgatactcattgaaagcctgaaggattgcctccggcgtcgctttttcatgcagcaaccgcaggtagcgaccatagcccgccagcgcttcatccagcatcccggcataatcgtcgctgctttgcaatgtacgcttctctatatcgctaaacccctgctgaaaaacagcctggattgccgacctgtcgccgcagttaattgccgccgccagcttgccgatgccagaatcgctgccgaaacgatagctcttttgcaacaaacagaggctatcgcgtaaagatgcggcttgcgttccggcccccgccggaatggcgctaccagtgagtcgacttagctgtcgggcgcgttccgccgtaaaccctgcgttgacataggcgcaaatatcgcccaacacagcgcccgcctcaacggatgccaactgatcgcgatcgccaagaaaaatgacccgcccgtgcggcggcagagcgtcaatcaaacgtgacatcatcggcaaatcaatcattgatgcttcatcgaccaccagcacgtccagatgtagcgggttgcccgcatgatggcgtaatcgctggctgccgggctgtgcgcctagcagtcggtgcagcgtactggcgtcctccggtatacgctttttctgcgcatcggtaagtggaagctgacgcaacgccgcgccgagcgactccgtcaggcgtgcggccgctttcccggtcggcgctgccagccggatacggcaacgttcgccatccgccatttgaattaatgccgccagcagcttcgcgacggtggtggttttaccggtgccgggaccgcctgaaatcacggagatacggcgagttagcgctacggcggcggccaccttttgccagttcacctcgtctgtcggagggaatagcgcgtccagaatacgggataactgatcttcatctacggcgatggcctggttaacctcgttaaaaaagcgcgcaaccgtacgttcgttgcaccacatgcgattcaggtagagacgctcgccgcacagaattaacggcgcggggctatcgccgcagctaaccgccgcagacgccagtaaccgctttttccagtcgattggcgtagccgtttcgcttatacaggcgaccagtaagggatgcgcctcctccgttaacgttaaacgcgacaacggcagacacacgtgaccttcacctgcgtcatgactaagcagcgctgccgccagcgtcacggcgggatcgtcgttaccggcgacggttaaagcaaactgggcatcaatgggccgtaagagtttttgttcaacggcctccagcaaccgctcctggattgtcattgcgcctcctcactcatttcacctgcaaacatatcatccagttggttaattaacgccgccgcagggcgagtggtaaaaataccctgctgcggacgttcgctatccaccccgcgtaaaaagagatagatgacgccgccgaaatggcgttcatagtcgtaattcgccatgcgatgacgaaggtaacgatgcaatgccagcgtataaagctggtactgcaaatcatagcgatgcgcctgcatcgccgtagccatcgccgcctgggtataagcggcgctatcctcgcccagccagttagatttatagtcgagcaggtaatagcgcccctcataacgaaaaaccaggtcgataaagccctttaacatgccgcgaacctgcatgaaatccagcgcagggcaacctgctgaaagcgggtcgtatcgacgaatcaacgcatccagctctccggcggtaagcggctgggcaatcggcagataaaactccatttcgacctgtttttcacgctcggtcagcacgctcagactaacgcccgtctcgttaaggggaacgtgcaacacggtgtccagccagcgggtaagtacgggctcccatcgcgtctcaaaaccactcagctccagtttttcctgtacccattgggggtttatcggttgagtaaaatcaagctcttcaaacaggttgtgcaaaaatgttcccggcgatgccccgcgaggaaagtgatgcggcgtcattgccggcgcttccgccgcttcgccaacgcctgcggcgtcaatgtcgagacgaggaataagatcttgcgccacgctatgtccccgctgctgcaaaccggaataactggtgacgcgccagctatcataaagcaggcgttgcagcgttctggcactgagttccgcgtgcgatgcagcggcaatttgccagcggtcgttatccgtattgcctggcgttcgacacacgatatcctcgtcgcatagcgcctcaatacaggcgcgaaggcctgcggcatccatcggttcgcctttttgcaggagtcgcccaagcgcgctttggtgcacatccgtctctcctttcttatcgctacgacgccgcaccagcggcgcgacgccgaggctgcaatgccacactgcacgggtcagcgcgacataaagtaggcgcaggtcttccgccaggcgttcggcttccgccagtgctatgctctcttcggcgtgactaaggtccagcaccgcctcgtaggagtgcctgtcgtgataaaaagcctggtcctgcacgcggaaatgggtgataaaaggtaaccagaccagcgggtattccagacctttcgatttatgaatggtgacgatttgcaccagatgcttatcgctttccagacgtagttgctggctggaagcattgctatcgggttcaaggatatgctgcgccagccaacgcaccagcgcatgttcgctttccagctgcgaaccggcttcctgtaacagctcgctaatatgcaaaatatccgtcagccgacgttcgcctcccgccgtcgccagcaggttttcagcaatattgcgcgccgacattagcgcgcgcagcataggcatcacgccgcgtttatgccaaatctgtcggtagccatcaaactcttcgacaaccgcatcccacgcattttcatcattgttaagcgtttcgatatccagcgcggtaaggcccatcattgatgtcgccaaagcgctacgcagcgtattctcacgttcgggcgccatcaccgcctgcaacacccacagcatctcctgcgcttcgagcgtttcgaatacgctgtcgcggttagaaagatagacggaggggatcgccagtaaggtcagcgcatcccgtatcagcgcggcttcccgcctgctgcgcaccaacacgctgatatccgaggcacgaacgggccgcgacgaatcgccgttcgtcagcagcgcgtcgcccgtttgcccggcacgcagccagtcgcgaatttgcgtggcgcacacctgcgccatataactttgataatcgcccgaaccgcagctttccccctccattagccacagggtcatcgccggttgaggcgcgtcattcactttaaattgcagcgactggtttctgggcgcaaactttaccggactgaagggaatatcgcggaacataaaggcgtcgttcatctgactgaacagcttgttaacgctattcaccatccccggcgcggagcgccagttagtgtcaagcgtatagtgcgcgctcacttcgctgcgagccttcatgtaggtgaagatatccgcgccacgaaacgcataaatcgcctgtttaggatcgccaatcagcaatagcgccgtatcgggttgatgtcgccagatacggcgaaaaatacggtactgttgtgggtcggtatcctgaaattcatcgatcatcgccaccggaaaacgggtacgaatcgccgcagccagcgcctcgccgctttcactacgcagcgcggtatctaaacggctgagcatatcgtcaaaccccagctcgccgcgccggcgtttttcctgagccaccgtttcacggatctctgatagcgctcgggtaagaaccagatctttaatcgatagcggttcgcccaacaggttatcaatggcgacaaacaatgggtgctggggcgtcacgccgccagctttggtgcgctcagctaaaaaacgctgtgaaaattttcccaacgcctcgggtaattgatagtttttcgtctcttcttgcgcccacgcggtgatcttttcgatccatttcgcctgattgccgcggttgaactttctgcgatcgatgccggatgattcgatcagcgcgtccagctcgctaaccgcctcacaccactgctgcttcacctggttgatgcgcgccaggatctgttcatgacgcgatgccagcgtctcctcctgcgatggcggcgctttaatgaccggcgcttcgccctgcagataacgatcgatatcctttaagagcgccttcggtcccttccacacgtcaaacaccacctgcgcgatgtcgcgcggcagcggatagcaatgacgccgccagaaatcggcgcaggcctgataacgcaacaaagattcgtcttcaataagctgttgctcaaacaacataccggattcgaaagcgttcaggctgagcatacgctggcaaaaaccgtggatggtaaagaccgcggcctcgtccatttgtcgttctgccagtaataaccactgcgcggcctgctttttgtcgctaatttcttccagcaagcgggcatacagcggattatccgtgctttcccgcagacaggcgatgcgcaactcatggatattactgcggatgcgcccacgcagctcttcagtggcggcctccgtaaaggttaccaccagcagttcttcaacggtcaacggacggggaaatgcggtgctgccgcctaaaccgagcagtagccgcagatacagcgccgcgatagtaaacgttttgcctgtgcccgctgatgcttcaatcaaacgctcgcctgtaaggggcaagcgcagaggatcaagagtctcggcgacatcattcattcttttcgctcattagaggtaacgtttgctgcaaagcgctgacgttatcccacactttccagcctgtcggatgcacgtattctgcttttccattctggctaccggcaatctgtgacaatattgccataccttgtggttccaccaccgcctggtggaagaaatcggcaagcttttgtggcgtcagcaattttatctgagcgatgattttatcacgcgagtcaaagcgcatattaccccgatcgaaatccttgcttaaacgggatgcttcttcgcccaacgtttgcggcgcctggcgcatttgcgtaatgatcgcctgctgaatttgggcgaactcttccggcttcatcgccctcagcttcgcctcggcgtcagggaaaaatgcctgatagcgttgccacaggtaagagggctgtttatcgttgctctgtagcaggaatcccattccccactgacggccaacgctcatcggaaaggcgaaaacagcgtatcccagttgctcttcggttcgtagctgattgtaaaaccacggttgaacaatctgacctaacatcgcgctgtaggcggcgctgacgtactcgtcgtagccgaccgggacaaagaccgctgctaacgcggagtcggtgctactgcccgctttttcaaatattacggactgctttttctcaaccaccacgtctttgttacgacaccacgccgatccgttcgccgcgagctgtttttggacatcttgcgccagagaggtcgcctgggcttcgctcatattccctataaccagaaattccggacgagcgcccgtttttaacgcattacgataggccatcacctcttttaacgtaatggacggcagcaaagcgcgacgttcatcacgggaaaaataaggcacctgcgaaatcatctgcaccggcataatcgcctgttcgtaggcttttcccttctccgcagaatccatcatctgcgtataccaggatttcgcctgcgccagctgttcctccgtggcgtcgtagctaaaatatccttccagcagcgccaggaaaagctgcggcaaacgctgggtataaccgttcgcagtgaccatcagaccattgttggcgttagtggaaaagctaatgccgcccactgccgcctggttgctgagctgatcgagcgccattcccgccagataatcattaagggcgaacagtacctgattgcgggcgctgtccatcgcctgcgggttacgcaataccacgctcacgtcagcttttggctcgctggcgaaataacgactcggcgcataaaccacgcgcaaatccgctttatcgacaatcagttctggccgcacgtagtttttgtcattcttaacaagcgaaaaatcatcaggaatataggggtttaactccggcagcgacaacgcaatgccctgtgctttttgctgccagtttttaaacgtctgttcgctaatcttatcgacctgataaggcgcatccacaaaatacgcaatcttattatggggttcctggggactgatgtaccagatgcgcgcattctgcggcgtcatcatcgccaggcgatttttgatagcggcaggatcgtaacgatcggcgatattcgccgcatccagcgtatgcgctaccgggacgcggatcatagtgtccgccagccactcgacatagtccatatcgcgggtaatcgacggatagcggaagtcgagatccagcacatgcgccagctcgtcaaagtaacgtttatctatccctttttcacgtaacgtattgagatagctaaagatagctgcgacgacttcatcacgattggccaaacctttatcagtcagcgttgccgaaatggcaaatacgccgctgttaccattaacaatcggatcggaatccgcgctaataccttcgaccagtccttgtttttgcagccagtcagagagcgtccccgggctacgattgccaatcagataagagaccagttcatcggtcttgctacggaactgcgcgctattgttatcaatacgaaactccacgcgcagcactttacgcggtagcgccggcacgtaatgaataatgatgcccttctgcgcctcggtgatgacaggtacggtaatttccggttttttaatctgtttattcggcacgcgaccataggttgcggcggcaatactcgccagttccggcaagggtttattactgtaaatcaccgccttcatcagattagatgaatagtatttttcatgaaaagcgatcaacgcctgttgcaccggatttcccggcttatcgcttagcgtttccagattgccgccagaaaagtgcgagcctggatgcgccgggttaatggtttcggcgcttacctgcgccatacgcataccgtcgcgggtgcgcgccatcgtcagctcggcattcaccgcgtttcgttcgcgttcggcatactttttattgagcaatggcgcggcaatggcgtcggccagtcgatctacggcacctggaagcgcgtcgttttcaacctccaggtagaaggctgttcgataaggcgcggtgctggcgttgtggctaccgccatgtcttttaaggtattcggcaaggctatccgcctgcggatatttttttgaccccatcaggcacatatgctcaagataatgagcaagcccctgatgagcctcaggatcttcaagcgatccaacgggcaccactaacgctgaaagcgactttacagcctgcggatcggatacgagcaacaccaccatgtcattatcaagacgtatcgcctgatactgccgggtatctttatcgcttttacggatagtttcttgcagcggttgccaaccgatatccgcctgaactgcaggcccccagagggcgaccaataacaataacgctttgaaccaggtgctgcggggcattcacggacctcatcattaactttcattcccactcatctgtatggtcacgtaaaccatcgacctgagcggaacgggatattattgtgctgaaccaggcagcatttttttatcagtaatcagtccgtgacgaagagcgcatcatagtcgaagccttttaatggcgcgattttcatacaatcaacgagactgattaaaacgaaacagcggtaacaggtaatgccgtgactgcgcaatgatagcctgcaacgtttcagattccagctgacgccaaagacgttgataccagatatcttcgccttcgccgctcaccatcatgttgccttcataagcctgtagaaactttgttctggccttctgtaaggtgtcatcgtcgtctaacatgacatcattttcagcgtcataacaggcttttatccatgcgccgccgctttccggcagtaccaatagcggagaagacatgccttcccggtagccttcaatcagttgcgccaggtaagccattgcctgcgttttatcaagaggcggaaatcgccactctccctctttgcgcaaaaacaggcgactttcgccactcccgccgctggcacaatagacaaggtgttccagccaaagttgcacaccttgcgccacgctgattaaagcgggacgccagcgcaataatccatcctcctgtacctgcggcagccagccggttagctgaacgccattgcaaagcagatccacttccaggctttggctcggcttacggcaggcgatgacccggcttgccagttgctgcatctcctgacattgcgcatcccagaatatttcgccaaacgcgccgtaaggcaactctcccgcagcccggaaacggcggaacaagcgttcggcgtcgtcctcttcaaccagcgtattgagcaactgttggttaagttgatatcgcgtcaatccctctaattcaaacggttccgcatcaggaatctcactctcttccgagcggaaattaacctgaagccgcatctgaaaaaatgcgcgtaccggatgggcccaaaaacgctgcagactttccagagtcaatgtttccggcatcgtaaaaggaagcggctgcacaaagtcagaatgcgcttttcccgactgactcgccgcgggcaaccactctctggcataactttgctgttcgccgggttggtaattttgcgcatcaaaaggcatacgggtatgcagacgcgtaatatgcgctttgactcgtgcttcgctctcatcacaggtcagcgtttcgtcgcccggcaaatagtggctttgtccgatgtaatccaccaattcttgcaccagtacagagggaaagcgttcgctattatcctggatggagcgaccgatgtagctgatatacagcgtctgctgcgccgagattaacgcttccagaaacaggtagcggtcatcgtcgcgacggctacgatccccgcgcatgggtttttggctcatcaggtcaaagcccaacggcgcaagctggcgcgggtatacgccgtcgttcattcccagcaggcaaacgactctaaacggaatggaacgcatcggcatcagcgtacaaatattgatggggcccgccaggaagcgctggctaatacgttcctgatccagacgctgcgccagttcatcccgcagtagcgaaatcggtaccgcgtcgccatattccgccgcgacgccttcggcgataatggcctgccactgctgttcaatcaatgtcattgccgcttccgtgtccgcatcgggcaggaagaaatcattgagcatatcgcgacaaacgggcagccactcttccagcggtcgctcctgcgccagaccgcgccgccagatattaagctgcatcagcagcgaagccagatgcccgaccagctcagcaatcagaccgctggattcgtcataaggcagaaccgactgccactcgccctgggcgctttccatcgcataccccagcagcatacgcgtcaggccaaattgccacgtatgctgccccgtggcaggaagttccagctcgcgtacgttgtcatcgtcaattccccagcgaatgcctgactcattgacccacaagcgcaaataacgcaacccttcttcgttgatcgtaaagcgggcagccaataccggtacgtctaacaacgccagaacatcctcggagacaaagcggctgtccggtaacgaaagtaggctgataaatgcctgtaacaccggatgtgactgacgcgcccgccgatcggaaatggcataaggcagatagcgctccgttggcgcgctaccaaacaccgcctggataaacgggctatagctgtcaatatcagccaccataacgataatgtcgcgcggcgttagtgtcggatcggcttccagcatcgccagcaggcgatcgtgcagtatctccacctcgcgctgcgggctgtgacaaacgtgaaaagagaggctgttatcctcgggatcgagcagacgcttattgtcgctgcgcgaatactcctcaagatttacgcccgccaccgcatggctttccagttcaaggatgtccgcctgaatccgatgcaaaagattatctggcgtaatatcaacaaacgcatccagctcctggctgttttccagttcagatagcaggtagatataatcccgtcccagttttccccatgaggccagtagcggattaccgatatcctgttcaccgtcgctgttaaataaggcttccggattctggttttcacggaacaacggtaaatgacggtcttcaaaactgtgacgacgctggcgagccatgagttttgccagccaggctgggtctttaatatccccccagtaataccgacacggattagtaaaaaggagatggatttcaatatgtttacccagcgcctgcaatgctctgagatacactggcggtaacgcggaaatgccgcaaataaaaacgcgggacggcaaccctggcgggcaggcggtcgcgctttccagcgtttgaataaagcgttggtagagattggcgcgatgccagcgcggctgccccagcgcggcggtatattccaccaatgctttccacaacggcgcctgccagttttgcgcctctcccagaccttccacggtttttcccgcttcccactgcgtaagccagtcaggccgataaaccagatactgatcgaacaggtcggcggcgcgcgcggaaagctgaaagagtttgcgtttatcggtgtcgtcggtcagataatggcgcagcagtacaaactcatccttatccagcaactgcggcagcaaggtcatcagtttccagctcatgctttgtttgctgaaagcgctttctttggggatatccggcaacacgcggacaaacatctcccagataaaactcgccggtaacggaaaagcgatattcgccgcaataccaaacttttgtgaaagggtcatctgcagccactgcgccatacccgtgctttgtaccagaatcatttctggttcaaagggatcatccagccgctcgcgttcgacgatgaattccatcaacgcttccagcacatccagacgattggagtggtagacccttaacataattactcctgacgattaacgatttggacaatgcaagcgcgtcatctgcccctgcctgccagagggtgaaaccatcgtgacgctgatgctgacacatcccgattgcgttgtctgcatccggttggccttccagccttcagcaggcgaaaatggatacagcgccgtttgctgccacgcctgccgccagatctgaagatactggtgtcgtaatgcaaaactgtgcattaatacccgctgatagcctgacagcgcggtgacgatcattaccattagaaccatcgccactaaaacttccgggaggctaaacccgcgttgtaaattcaggggatgcgacataacgccacctcttttaacggacaaaaatcgctccagccgtggggagaaaagacaatgcttccctgaatgacgttgcccaaacgccataacgtcatgctgtcatcttgcgccgccatcaccacctcatcccccggtaacctccgcaaacagactctcgctcctgaagaggaatagcgccgacattccatttcggttacgcctgaccatagctgcccccgcccccattccagcgccgactgtacgagcgcctggcgttgtatcgccaggctctgcgtcgtcacgcgggtggcatagctggcctgctgctgatttacgccttgcagtagcagactgcccagaatcagtattaaaagcgccagtattagcgaagaagcgccacgttcccgattcacagattaaatcccgttacgctgtattgcgcgtcaataaccgtctgaggctcggctttgctggcgccgcgcagatgcagcatgagcactggcgagaatcccgttatatcccggcgctcaacggtaaacgccgtgatgagtaccgtattgggatcggtcattttttcccatcccttaccctggcaagatgttgctccgcgtaatgtctccagaacgttatccttcacacgaaacccggtctggtcggcctctttcgccggtatggtatcccagacaccgttattattcccgtcccactgaacgatgacgcattgcccctgttcggcaagatgtaacccttcgccaatacagtggccatgacagtaacccgcacgttgaagatgcttcgctacggtataggttcgctgccagatttcatcttccagcgataactgtcgcgtgttgtgccagatctcacgctgtagcgccggtaaaaatcgtgcggacccaagcagtaaaatggaacctatcgccatcgccagcacgacctccagtagcgagaacccccgcgtggttattgacacgtggcggcctcgttacgctcgcatagcctgattcgcccccaggaggagacgaccagacgccactctccggcagcgtttttcagtacgatgtgccctgcccatgccgtattgcgcaagccaaagaaggctaacgacggcgtgatatcggcaaggacgacatcacgccagtcgggcgtaaacacaaagggggaagatggcgtacacgatgtttgcgtagcaacagagctgacaaagcaccatgaaccgccttcgctgaccacgcgaagaatgtgatcgcggttatgccagtgagcatcctcacgaagttgcagcaggtaatcccgcacctgacatgcggtttgccacaggcgctgttgctgctgccagcgttgccagccataaagtcctgtggcgctgagaatgataatgagcgacatcgcgaccaccgtttcaatgagcgtatagccctgttgttttttcatgtcggcagtatggcgggcggaagaaaaataacgagcgccaaatacagattgttcggcgcgttacggaaaaaagttcatgtcttgcagcgcgttgcaaaatttcaggaatccgcgccgaagattgagacgaagggtaaaaaaaaccgacgcgcaatgacgtcggttatggcaggatcgtcagcgcttagatagcgaccggcgctttaataccggggtgcggatcatagccttcaatttcgaaatcatcgaaccggtagtcaaaaagcgaatcgggtttacgcttaatcaccaatttcggcagcgcgcgaggttcacggcttaattgcaggtgcgtctgctccatatggttgctgtacaggtgcgtgtcgccgccggtccagacaaaatcgccgacgtccaggtcgcactgttgcgccatcatatgcaccagtaacgcgtagctggcaatgttgaacggcagaccgaggaacacatcgcaggagcgctgataaagctgacaggagagttttccatctgcgacataaaactggaaaaaggcgtgacacggcgccagcgccatcttatccagctcgccgacgttccacgcagaaacgataatacgacgagagtccgggtcgtttttaagctggcttaagaccgtggcgatctgatcgatatggcggccatccggtgttggccatgcacgccactgcttaccataaaccgggcctaaatcgccgttctcatcggcccattcgtcccagatggtgacattattttcgtgcaggtaagcgatgttggtatcgccctgcaaaaaccatagcagttcgtgaataattgaacgtaaatggcagcgttttgtcgtcaccagaggaaagccttcctgcaggttaaaacgcatctgatggccaaaaatggaaagcgtgccggtgccggtacggtcgtttttctgtgtgccttcatccagcactttttgcatcagttctaaatactgtttcatggttcctcaggaaacgtgttgctgcgggcggcggcgatatgcccaaaccatcatgatcgcgccagcgataatcatcgggatagagagaatctgccccatgctgatgtactgtacccacgcgccggtaaattgcgcgtccggctggcggaagaattcaacaatgatacgaaacgcgccatagccaatcaggaataatccggagactgcgcccatcggacgcggtttgcgaataaagagattaaggatgataaacagcaccacgccttctaatgccagctcatacaactgggaagggtggcgcggcaatacgccgtaggtatcaaaaataggctgccattgcggatgtgacggcagcagcgcaatatcttccgcgcgtgagccaggaaagagcatggcaaaccggaagtcaggatcgacgcgcccccacaattcaccgttgataaagttgcccagacgcccggcgcccaggccgaacggaattaacggcgcaataaaatcagacacctgaaagaacgagcgcttcgtgcgcctggcgaagataatcatcaccagtatcacgccgataagcccgccgtgaaaggacatgccgccgtcccagacgcggaataaatagagcgggttatccagaaacagagggaagttataaaacaggacatagccaatacgtccccccaggaagacccccaggaaacctgcatagagtaaattttcaacttcgtttttggtccaaccgcttcccggacggttagcgcgacgcaccgccaaccacatcgcgaaaacgaaccccaccagatacatcaagccataccagtgaagcgcgacgggcccaattgagaaaatgaccggatcaaagtccggaaaatgcagatagctactggtcatctgtcaccacaatttcttgttatttcgctgaagagatagcgattgataagcgcgcctgcgcgttgcagacgctccaaaggtgcgaataatagcacaagggttaaaagcgagatgccgattaccgttaaaagatatgtatacgcattgtctttcatcttgcaggcgtgttgtctgcgccgtgaatccacagtcactctcttttcccgctccagtcgttacaaccctccgcgaatcaatccccccatcccgcggcgctccataaacgccgccacctgatgacgcacctcggtcgccatctgcgcctcaaggctgcgtctggcaagggtttgcgcgtcttcaaaatcgatatgccgcagcagatatttcacacgcgctaccgaacggccattcatcgaaagatggcgatatcccagaccgataagaatcgccacgcacatcggatcgcccgccatctcgccgcacaagcgaagatcgaggccatttttttcggcttcctgcgcaatcatgctcagtgcgcgcagcatagccggatgcagactgtcgtaaatactggccacgcgggtattgttgcgatctaccgccaggatatattgcgttaaatcgttggtgccgaccgagataaagtcgatccggttagccagatgcggcagcataaataccattgacggtacttccagcataatgccgatacgcggtttcgggatcgcatagccgatcatctcctcgacctcgcgcccggcgcgttcgatcagacgccgcgcttcatcgacttcatcaatactggtgaccatcggcaacaaaatgctgaggttgccagtcgccgcattggcgtgcagcatcgcgcggacctggatcaaaaagatctccggctgatccagcgtaatgcggatcccgcgccagcccagacacgggttctcctcgctgatcggcatatagggcagttgcttatccgctcccacatccagggtccgcagcgtcaccggtttatcgttaaacatttgcagcatcccttgatactgcgccacctgctcttcttccgagggaaacccgctttgcagcataaagggaatttcagtacggtacaggccgataccgtcgatccgactgcctaacttttcctcatgctcgggactgagcccggcattcagcatcactttgatacgctcgccgcttttcagttgggcgggaagattgacgtcgtcctccgccagacgactgagttctatctcttcactaatgagccgctgatattcctgaataagtacgggttcaggatcgaccagtaattcaccgcgatagccatccaccaccaacgtacggcgatgtagcaccgaaggctggatatccgcacccatgacggtcgggataccgagcgcgcgcaccataatcgccgcatgcgagtttgccgcgccgtcgcgcaccacaacgcccgccagcctgtcctgcggcagctccgccagggtggtcgccgacagctcatccgcgaccagaataaaacgttccggccaggcgtttggcccctgaactgaatcatcaaggtggaataacagccgctgccccagcgtgcgtaagtctcccgcacgttctttgaggtagttatcggttagcgccgcaaattgctcggcaaatttttcgatgatttttttaacggcccactccgcaacagcgcctttgtcgacctcggcgaagagttcgcgacgcagtctggcgtctgaaagcaggtgtgagtacagatcaaaaatggccgccgtctctttttgcgcgccggcggcaaagcgtttgctgtatcgtcggaattcgttcgccgcctcttccagcgcgccggtcagtcgttcacgttcaagagaggtatccagcgtagacgcttcgtaaacctgttccatcagcggcatggtcgcgtcttgccagcccgttgcgatagccacgcccggcgccgcaggaagcgcgcggattcgcgtctgccggtattgcccgaacagcgctgtgacctgcgactgtgacaggatagccgccatctgcgtagcgagcgtgacaaggaaagactcttcgctttcatcgtactggcgcaattcgcgctgctgtacgaccagcacgccgagaagttggcgacgctgaatgatcggcacgccgagaaacgcgcgaaaacgctcctcttttaccgaaggaatgtatttaaagctgggatgtttttgcgcatcggcaaggttaatgggttccgccagtctgcccaccagaccgacgatcccctcatcaaacgcaagcgcaacggttcgaccacgcggttttttcaacccccgcgtcgccatcaggtaataacagcgtcggtcatgatcggccaggtaaaccgagcaaacctcagtatccatcgcaagacagatatccgtgaccagaatattcagcgcctcgttcagacgcggcgcactggccactttttcgactatttcgcgcaggcgagtgagcataatttgcgtggcttaacctcttttacgtcgataagcaggcgcgctttgtagcttagggggattatcctgaagcgccatgacaacacttgcaaactctttcattaccctgcggtagacatcgcgtttaaatgacaccacttgtcgaaccggataccagtaacttacccagcgccagccgtcaaactccggcgtactgctggtttgcatattgatttcggcgtcggcgctcattaactgcaaaagaaaccacttttgtttctggccgatacataccggctttgtgtcccaacgcaccaaacgttttggtaacttgtaacgcaaccagttgcgagtagaagcaaggatccgcacatctttacggcttaacccaacttcttcaaacagttcccggtacatcgcctgttctgccgactcccctggatttatcccgccctgcgggaactgccaggagtgctgaccaaatcgccgggcccacatcacctgcccctgacgattacaaattacgatacctacatttgggcggtagccatcgtcatcaatcaccggactacctcaacataaaccttatatatgaacgattgtttcatactccagtgaggcggtaaaccactctgtaatagtgacacagcctaataacaattgaataactcacagtaaatagccgagttataaacagatgatgacgcccttgcgccattttattcaccttttctgtggatatagttgtgaagaagtatggaattaccacgggaaaacccagaacagtctgaattcctcatgctggagacagtaaaaatagtgccttatattcattgcattatagacaaatcttacatgctaccttcataaagcgtgaccagcatcacatctaagatccttatgctgatgaaagatcaaccagcgtcggttttatccacagattgtgccaataacttacgcactatttgtctgaattttcgattttcgtcgcacgtcaaggctgtaaatggaaacagtagtggtggttttacacagttatcccaactttctgtggataacatagtgtaagatcctgtttattgtcagtgaccagaattggaaaacccgcttcagcgttgcgcaacacgaagaaacaacacaaaaaaggcaataaaaatcagtctattgaatataagacacagaaaaagataaactctgcccatacggtataaaatcactgctcattttttgacctaaggtaattgtcatgtccgctctttgtccgctactgactccgcctgcttcggaagcattgctgttagcccaggcgcggcagctttccggctatacgttaggcgagctggcggcgatggccggcattaccacgcctaaagatttgaagcgagacaaaggctggatcggcgtcttgctggagatctggctcggcgccagcgccgggagcaagccggagcaggatttcgccgcattaggcgtagaactgaaaaccatcccggtggatagtctgggtcgtcctctggaaacaacctttgtttgcgtggcgccgttaaccggtaacagcggcgtgacctgggagacaagtcacgtacggcataaattgaagcgcgtgctatgggtgccggtcgaaggcgatcgcagcataccgttagccgaacgccgcgtaggttcgccgctactctggagtccgagtgaagaagaggacaggcagctacgcctcgactgggaagagctgatggacatgatagtgctgggccaggtggaacgcattaccgcccgccatggcgaagtcttgcaactgcggcccaaagccgccaatgccagggcgctcaccgaggctatcggtgcgcgcggggaacctattttgacgctaccgcgtggattttatctgaaaaaaaattttacgcaggcgctgctggctcgccattttttattgcagaatccgtaacgtccattacacgcaaatgcgcctccgctatggctacgcgtcggaccgacgcccgataaacgtaagcgtattgtcgccgctattttacaccgttcctggttgcgcaaattcagcctgggctttcgcccgtcacccgacgggcctataattaccgcttctttttttggcaggactttgttcgatgttatttgcatggataaccgatcctaatgcctggctggcgctcggtacgctgacgctgctggagattgtacttgggatcgacaacattatttttctttctctggtggtagcaaaacttcctacggcgcaacggaaccacgcacggcggcttgggttggcggcggcgatggttatgcgcctggcgctgctggcgtcaatcgcctgggtcactcggctgactaatccgctgtttgagcttttcggcgaagcgatttccgcccgcgatctcattctgttactgggcgggttatttttaatctggaaagccagcaaggagattcatgagtccatcgaaggcgaagaagaagggttaaaaacccgggtttcttctttcctgggcgcaatagtgcagattatgctgctggatattattttcagccttgattcagttatcacagcggttggcctctccgatcatctgtttattatgatggcggcagtcgttattgccgtgggcgtcatgatgtttgcggcacggcccatcggcgagtttgtcgatcgtcatccgtcggtaaaaatgctggcgctctcctttctgatcctggttggctttaccctgattctggaaagtttcgacgttcacgttccgaaagggtatatctatttcgccatgttcttctctatcgcagtagagagcctgaacctgttgcgtaataaaaagaatccgctgtaatcctgtctcgctcccccgccggggagcgaatactcactttatttcctttcttctcacagattaagattttgctgcttccgacatgcagagccgcgcgttattactagactattatcagacatatgattaacagactattatcagatgcaggctacgtgaggacaaacggatgaaaaagtgggcagttgtaatttccgcagtagggttggcttttgcggtatccggatgcagcagcgattatgtaatggcgacgaaagatggtcgtatgatcctgaccgatggaaaaccgcaagttgacgatgataccggtctggtcagctataccgatgcacagggaaacgagatgcaaatcaaccgtgacgaagtgtctcaaatcatcgaacgttaagcggtggcctgtgatcgaggtcagcgttctgcaagccttcaggctgcgtcccgtaacggtgcgtggcgaccacgcccggtaacaattacgccgcgcagcctgcaattttactttcccttttgccttccctctgccatttttattgtcctttgtcgggaatttctgacttcataataaaaaggaaacggctatgcactatcaccgtataccccacagctcgctcgaagtaagtacgctagggctgggcacaatgacatttggtgaacaaaacagcgaagccgacgctcacgcacagctcgactatgccatcgcaaatggcattaaccttatcgatgccgccgagatgtatccggtaccgccgcgcccggaaacacaagggctgacggagtcctatatcggtaactggctcgccaaacgcggcaaccgtgaaaaactgatcatcgccagcaaagttagcggaccggcacgtaataatgatcaaggcatccggcctcatcaggcgctggatcgtaaaaatattcgcgaagcgctacacgacagtttgacccgattgcagaccgactatctggatttgtatcaggtgcactggccgcagcgccccactaactgcttcggtaaactcggctataactggacggactccacgccagtagtaagtctactggagacgttagacgcgctaagtgagtttcagcgagcgggtaagattcgttatattggcgtttcaaatgagacagcgtttggcgttatgcgctatctgcatctggcggaaaaacatgacctgccgcgtattgtcacgatccagaacccctatagcctgttaaaccgcagctacgaggtcgggctggcggaagtcagccagtatgaaggtgttgaattgctcgcctactcctgtctggcgtttggcacattaaccggtaaatacctgaacggggccaaacccgcaggcgcgcggaataccttgttcagccgcttcacacgttacagcggcgaacaggcgcaaaaagccgttgccgcctacgtcgatatcgcgaagcgtcacaatcttgatccggcgcagatggcgctggcctttgttcgccgccagccgtttgtcgccagtacgttactgggcgcaaccacgatggcgcagctcaagacgaatgtggaaagtctgcatctgacgttaagcgaagaggtcctggcggagatagaggcggcgcatcaggtttatacctacccggcgccgtgatagtcagtgcccggtggcgctacgctaccgggcttacagagacaatgtaagccggataacgcgcactcgccgcccggcatattcactcagtatgatgcctgccggcgctgccagatccacagcgccgcgatcgccagcgcgaacagcacgccaaagccgatacctatcgccactgccggaacgccaaccagcaccgccagcgagtacagtcccagcattaatagcatggcgctattctcgcccagattttgtacggcaatggcattcccggcaccaacgctcttcttaccgcgctcctggagcaaggcgttgagcggcaccacaaaaaagccgcccagcatacctatcaacagcaacaaggcataagcaggcagcaatgcgtgctgtaatgagaagatcgcaaccacaacgccaatcaaaatcccggcgggcatacagcgcgatacggtctccagcgtcaccagttttgccgccgcgcccgcgccgaccacaatgcctaccgccaccatggcgttcaggtaagtcggcgtggcgttatccgtaatgcccagcgccactggcacccacagcaccagcagaaaacgcagcgtcacgcctgcgccccagaatagcccggtccccaccagcgaaaaacgcgtttcaccgttacgccaaaggacaacgcaagcgctgaagaaactacgcgtcatcgccgacaaccgccaggattgtcctggacgcgccgccacaagcttcgggataaacaggttagccgccactgcgccagcgtaggccaacgcgcaggcaaccagcgcggcgatgacatgccagtcggccaatacgccgcccgcgacggaaccgagcaaaatcgccgcaatcgtagaggcttccatcaggccattggctttcaccagcttatcacccgtcgtcagttcgcccagaataccgtatttcgccggagaataagccgccgcgccaatcccgaccaacgtataaccgacaaaaggatttacgccgaggcagatacctgccgctcccgccagtttaagaccattggcaaccatcatcacccggcctttggcaaagctgtccgccatctggccgacaaacggcgcaaaaagaatgtaagcgcccacaaacaccatttgcaaaacaggctggctccagtccgggtaaaactgagctttcagcagtgccagcgtcgcaaacagcagcgcattatcgccaaaagccgagagaaactgcgcgacaatcaccgacagcatccctttcgaccagatggaggtgttagtacgtactgactcactcatgatgttgttccggcgcatccacccaacttttcagcgtcacaaaatcgggtttcccgctgccaagcaagggaagctgcttcagataacggatatcacgcgggacggcaagttccggaataccgtgttcacgagcatagtgctgtaacttttctcgggtgagttcgctgtcagtcgtaaacagtaccagcgcttcacctttgctggcatcacttttaatggcggtagcgtgcattttgtccgccgaaacgccaagcgccagttgctcgaccatctccagcgagaccatttcgccagcaattttcgcaaagcgtttcgcgcgcccctgaatctgcacaaaaccattttcatcgaagcgtacaatatcgcccgtgtcgtaccacccgcgctcggtttcgcctctggcgttttccgccgacggcacctccagcacgcccggtttttccacgcgcagatagccattcatgatattcggccctttcagctgtagccgaccgccgttttcaataccgggcaccgccagcagacgcgcgtccatgccaggcagaatgcggccaacagtgccaggcttagccgccatcggcacgttaatcgagactactggcgcgcattccgttaccccgtagccctcaagaatgcgcagaccgaatttatcctgccacagttgtttggtgctctcctgaagtttttccgcaccggccaccacatagcgcaggcgataaaaatcatacggattggcaaagcgcgcatagttgccgaggaaggttgacgtaccaaacaacacggtacagttacggtcatagaccagttccggcacaatgcggtagtgcagcggacttggataaagaaacacttccgcgccggtcaacaacggcgtaaacaggcccaccgtcaaaccgaacgagtgaaagagcggcagcgccgacataaaacggtcattggcggtgaaatccgcaatcgtttttatctgctcgacgttcgccagaatgcttttatggctgtgcaccacccctttcgggtgcccttccgagccggaggtaaaaagaatgatcgccgcgtcttccggctgctgttttacctgcgccagtcgcggcgccaggaggtgggcaaaaatccacagcttgtcggcgggtgtgacgtccgcttttaaatcttccaggtaaacccagcgaacctgcgttagctgctccggcaggtgccacaatttacctttatcgaggaactggcgggaggtaaaaatcgttttaatttccgccgcggtaatcgcgctggtcagcccttttacccccgctgtgtagttcatcatggccggaatgcggcgacgagaaaccgcgccgaaaatcaccgccgcgctgatggcggcattcggcagcattaaaccaattttctcgccctcaacgctgtacttttccagaatccggccaacaaagagcgtcttggtcagtaacttacgatacgtatccggcgtaaagttaatgtcctcaatacagtttttacccgcgccgtaacgatattgcgccgccagcaacgattcgtataacgtctcgcgcgggcgcaccgccatacgcgcttccatcatgatctggtgcagcatctcacccgctatcttacgtctgtcgcgcgcgcgcggcgcttccggcatcggtatttgcgtcggcggtaaaatatgaagctgaatgcgggggaataagcgccgtttaaccagacctttcaggcgactgaaaggggtaagctccgcgccgtcaatgcggagcggaatgacggttgcgcccgattttgccgccacaaagcctgcgccgtcataaattttcatcagcgaaccggtcacggaaatccgcccttccgggaaaatcaccactggacgcccctgttccaccagacgcaccaggtgtttaatggacatgggtttagtgggatcgagcggcacaaaatcgatcagcggcgttaaccagcgcatataccattgctggctgatggaggtatataccgcaaagacaggccgtaccggcaaaaacagcgccagtagcataccatcgataaatgaaacgtgattgggggtaattaagacccggttcccctgtagcgcccggacatcgccagtgacgcgcacacgataaagcacgcgaaacaggttacggaaaaatccaaacagcatttcaactccctttggccgacaattcgctaaaacatgaattgtggcagattacacgagttgcgtaacaggagcgatagcaaaataggttcgaaaaaaaacctgcgcatccgcgcaggttggtgcaagagacaggtacgaagagcgtaccgaataatctcaccaatcaatacctctgggatcttgattgtgggcttcgcgcgtctgcatcgccagtccgaaaacgcaaaggaataaacggaaatgcaacgagttgtgtaaattatccgttactgttacaggttcaggcgaaacaaaaaaaaacctgcgcatctctacgcaggttggtgtaattcgtgtgatcaacaatgacgttgattccacctatcaatacctctgggatcaccactctatcaacctgactcgctggcctgccagcagacaatcgcaacagcgcttcgcaaactgtaacgaaagatttgtattgtcactttacagacgcatttctcccgtgcaggtcacatttgcccgacacggcggggcaagaggcttgaacagacgttcattttccgtaaaactggcgtaatgtaagcgtttacccactataggtattatcatggcgaccataaaagatgtagcccgactggccggtgtttcagtcgccaccgtttctcgcgttattaacgattcgccaaaagccagcgaagcgtcccggctggcggtgaccagcgcaatggagtccctgagctatcaccctaacgccaacgcgcgcgcgctggcacagcaggcaacggaaaccctcggtctggtggtcggcgacgtttccgatccttttttcggcgcgatggtgaaagccgttgaacaggtggcgtatcacaccggcaattttttactgattggcaacgggtatcataacgaacaaaaagagcgtcaggctattgaacagttgattcgtcatcgttgcgcagcgttagtggtacacgccaaaatgattccggatgcggacctggcctcattaatgaagcaaatccccggcatggtgctgattaaccgcattttaccggggttagaacaccgctgtgtcgcgctggatgaccgttacggggcatggctggcgacccggcatctgatccagcaaggtcatacgcgtattgggtatatctgttccaatcacactatctctgatgccgaagatcgcctgaggggctattacgatgcgctggcggaaagccatatcccggctaacgatcggctggtgacgttcggcgaaccggatgaaagcggcggcgagcaggcgatgactgagttattaggccgcggcagacattttaccgcggtggcctgctataacgactcgatggcggccggcgcgatgggagtattaaatgataatggcgtgggggtgccgggcgaagtatcgctcatcggttttgatgatgtactggtctcacgctatgtgcgtccccgactgaccaccattcggtatccgatcgtcaccatggcgacacaggcggcggagctggcgttagcgttggcggggaaatgccctacgccagaagtaactcatgtatttagtccgacactggtacgccgacattcggtatccacgccgacggataccgggcacctgtcgacaaccgattaatcagggtagcatgatggcgacaatgctggatgtttcccgccatgcgggcgtatcaaaggccaccgtctcacgagtgctgaatgggacggggcaggtaaaagaaagcacgcgccagaaagtgtttacggcgatgcaggctctgggctatcgccccaacctgctggcacgctcgctggcgaatcgcaccagcaacagcatcggtctggtcgtctctacgtttgacggcttctatttcggcagtttgttgcgccgggcgtcgcgccaggcggagtttcataacaagcagttgatcgtcaccgatggtcacgatacgccggaacgagagcagaaagccgtacaaatgttggccgacagacagtgcgacgctattattctttacactcgctatatggatgagccggcgattttgtcgttgattgacgccacggaaatgccgctggtgattattaatcgcaacgtcactcaggcccgcgatcgcgctattttcttcgagcaggagacggcggcattccaggcggtggaatacctgattacgcagggccatcgcgatatcgcctgtattacgctgcctgttcatactcccactggcacatcacgcgtagcgggttatcgcaaggcgctggaaaagtatggtattccctggcaaccggcaaaagtgaaatacggcgattacacgctgacgcgcggctatgacgcctgccgggaattactggaggaaggcgtcacgtttagcgcgctattcgcctgtaatgatgacacggcgctgggcgcggcaaaagcgctgcgccaggccggattacgcatcccgcaggatgtgtcgctgtttggttttgacgatgcgccgggcgcaacctggcttgaaccggggctttcaacagtctatttacccatcgaggatatgatagccaccgcgatcgatcaggccgttcgcctggcgaacagcgagccggtcgccccgatcccgccctttaccggcacgctgattctgcgcgagtccgtcgccgcgggcccgttttttcaacgtccggcctaatgaggcgcttcagagcatctccagcgctaacagctcttcaatggtctgacgacggcggatcagccgcgcctgtccattgtcaaacagtacttccggcaggagcgggcggctgttgtaattcgatgacatagacgcgccgtacgcgccggtatcgtgcaatacgaggtaatcgccggggatgaccgcaggtaaggcgcgtgtttcaaccattcccccttcctgctgcgtaaaaacatcgcctgattcgcatagcggcccggcgaccaccgtctcgacccacgggccattttcaagcgcgcgaccatccgccgccagcgccgaaatacggtgatagctaccgtacatcgccgggcgcatcagatcgttaaaacccgcatctaccagcacgaaatggcggcttcccatctgttttacgctacgcacctgcgttaccagcacgcccgattgcgccaccagaaaacgtccgggttcgatctcaagtttgaccgcatgtcccagatggcgggcgatttgctcgcgcgccgcgttccacagaccatagtaatggcgcgtatcaacgggctcttctccctcacgataaggtatcgagagtccgccgcctgccgaaatcgcctccacatcctgaccacattccagcacctggcgtaccatcgcgccgcaaacctgctccagatggccataatcgacgccggaaccaatgtgcatatggataccgacaagtttcagtcggtatttctgcattaccgccagcgccgccggaagatcgctatgccagatgccgtgtttgctgttttcgcccccggtgttggttttctggctgtggccgtgaccaaagccaggattcacgcgcaaccagacgcgatgcccaggcgaaacctgaccaagctgcgtcagcatatctaccgagccggcattgaccggaatatgcagttcgctgacgcgcgccagcgtggcggcgtcaatcacatcggcggtaaaaacgatatcatcagggcacgtttgcggatcgtagcccgccgccagcgcacgttcgatctcccccaatgaaacagaatccaccttgacgccctgcgcgcgcattaagcgcaggatatgaatgttcgaacaggctttttgcgcaaaacgcacgacgtcaaactgctgcagggcggctatctgacggcgaataatgtgcgcgtcatagacccagaccggacagccgaattcagcaggcaatctgagcaaattttcagcgttaaggtcagtttcagcgtaataatgcggcaatgacataacaaactccggaacaggctttttaacgattacgccataccttagaaagaataaaaaatatcgttttattgtcagtctatgcaaaaatgatatgggataaatgattcagggaaacgtatggctgccgttaatttacgtcacattgaaatttttcatgccgtaatgaccgccggaaatctcaccgaagcggcgcggctgctgcatacctcgcagcctaccgtcagtcgcgagctggcgcgttttgagaaagtgctgggattaacgctgtttgagcgcacacgtgggcgcttacatccgacggtgcaagggctacgcctgttcgaagaggtacaacgctcctggtatgggttggatcgcatcgtcagcgcggcggaaagtctgcgcgagttccgtcagggcgagctctctatcgcctgcctgccggtcttttcacaatcctttttgccgccgttactaccgccttttctggcgcgttatccggatgtcagcctgaatattgtgccgcaggagtcgccgttgctggaagagtggctctccgcccagcgccacgacttagggctgacggagacgcttcatgccccggcaggaacaacccgcaccgagttactaacgctaaatgaagtgtgcgtactgccctgcgaccatccgcttgccgccaaaacggtactgacgccagacgattttcagggggaaaactttatcagcctctcccgcctggacagctaccgacagttgttggatacgttatttgccgaacatcaggtgaagcgcagaatggtggtggaaacgcatagcgcggcctccgtctgcgcgatggtgcgcgccggggcgggcgtttcgatcgttaacccgctgaccgcgctgggctatgccgccagcggcgtcaccgtccgccgcttcagcattgacgtgccctttaccgtcagcctgattcgcccgctacaccgccccgcctccgcgctggttgacgccttcagtaagcatttacaaacgcatctttcgcgcctggtcgaaccgctggaggttattctggggccgatgacgaaagcataaagctcacggcatctgcagcatgaattgccgtggtatcgaaaaccggtagcgcgctttgcgtctggggaacaagcaaacctatttcagtgcagccaaaaataacgccctgcgcgccttgcgcagccagttgttcgataacctgtaaataatagtggcgcgacgcgtcggtgaatgtcccctgacagagctcgtcaaaaatgacctgattgatacgcgcccgatcgtccgcctccggcacgatggtctcaatcgcaaattgctgttccagccgcccgcgataaaaatcctgctccatcgtatagcgggtccctaatagcgccacgcgatgcaacccctgacgggcgatagctcgcccggtagcatccgcgatgtgtaggaaaggcagagaacaacgagattcaataacgtgcgcgattttatgcatggtgttggtacacagcacaatgccttctgcgcccgcctgctgtaacccctgcgcggcctgcgccaggatatcgcccgctttatcccactcgccgcggcgttgacatacttcaatatcgtggaaatctacgctatgcagcagtaagctcgccgagtgcaggcctcccagctgctgtttaatgccttcattgattaaacggtaataagggatagtcgattcccagctcatcccccccaacagtccgatcgttttcactgcgctctcctttttgtaaagcattatggcagtgaagcaaacttacacatccgtttccagtctatttttcatcatgccggataacaggcgtcatccggcatgggaggggtgattacacgccaatatttcttagcttctcgcccgccatcagcttgcgttcgatgtgctccagggtgacatttttggtttccggaatcagccagaaagtgatgccgataaaagcgatattcagcgcggtgtagagccagaatgtacctgccgcgccaatgctgtccaacagtgtcaggaatgtcgcgccgatgatcatgttcgatacccagtttgtcgtggttgaacaggtaatgccaaaatcacggcatttcagcggctggatttccgaacacagtatccacaccaccggagcggcgctcatcgcgtaaccggcgatacacatcatcgtcatcccaacggaaagccaggagagaccgcttgatgccgtaccgttatcaaactgcatcaggcagtagcccaacaccaatgtccctaacgccattacgctgaaaccgatttttaacgccggtttacgcccggccttatcgaccgtaaagacggcgataaacgtcgcgaacataaaagtcagtccgaccaccagcgtggcgatcatttgctgttccgtggtggtaaagccggccattttaaaaatgcgcggcgcatagtacataatgatgttcatgccggtgaactgctgcattgcctgtagcagcataccgaggaacacggcgcggcgaacattgcggttagctttaaataatgcccaccctccctgcttgagtttgaggctttcccgaatttcattcagttcatcacgggctttttccgaggtatcgcgcagcatacgcagcacctcttccgcttcaatatggcgacctttttgcgccagccaacgcggactattcggcaggaataccacgagaataatgagcaacaccgcaggcagcgccagcacgcccaacatcgcgcgccagttgccgctgtagctgaatgccgtatcggataaaaaagccagcacaatgcctaacgtcaccatcagttgatacatactgatcattttgccgcgaacattttcgctagccatttcagagagataaagcggcgcggtataggaggcaatccctactgctacgcccagtatcacgcgggcgccaatcaatacttccacgctggaagcaaacgccgaccccagcgagccgagcacgaacaaaatcgcgccagccatcaggctatacttacgccccagccggaatgaaagccagccgttaaataatgcgccaattgccgcgccaagcatcatgctgctgacgacccattcctgcagccggctggtcagtacgaaatggtcggtaataaaaggcagcgccccggcgataacgccgatatccagaccaaataacagtcccgctaccgctgcagaaaccgaaacaaacatattcatacgtcgtgtgtcgcgaagcgaacgcggcgttaaagcagagtcatgattaatagagaccatattttcctgccacaacagagtaagacatagcctgaaagtacgggatactcttcctcaagtgtcaggctggaaacggcataaatatggattaaatggctacgctatagcgatatgtgatggatattacactttttaaatttaacgccgttgccgggtattttttcaaaccaccaatatttcaataagttaaagcattgatcatagctattatttaacaatatatggattaagttaaacccacaatatggactatgctaatgagatcataaaaaaaccctgtacgaggacagggctttatcagttttttcggccaaagagtcgactttcccagaaacgcatttgtcagtagcggattaacgcgccagccaaccgccatctaccgctatggtatagccgttaacataatcagcggcgctggatgccaggaagactaccggacccattaaatcgcccggtagcccccaacgtccagccggaatacggtcgagaatttcggcgctacgttgtgcatcagcgcgcaattgctgggtattattcgtggacatatagcccggcgcgatggcgtttacattgatattgtgtttcgcccactcgttcgccatcagacgcgttattcccattacgccgcttttcgacgcggtataagacggaacgcgaatgccgccctggaaggaaagcatagacgcgatattaataattttgccgccgttgccctgggcaataaaatgttttgccgccgcctgagacataaagaacacgctcttgatgttcaggttcatgacgtcatcccagtctttttccgtgaaatcaatcgcatcttcacgacggattaaacccgcgttattcaccagaatatcaatatgaccgtattctgccaccgcccgttccagtaatgccggaataccatcgatttgacgcagatcggctgtcaggcttaaaaaacgacgtcccagagcggtgacgcgcgcaatagtttccgtcggttcaacaatgttaataccgacaatgtcacagcccgcttccgccagccctaacgccattccctgccccaatccggtatcgcaccccgtcacaaccgcgactttaccttcaagagaaaatgcattcaaaatcattgttaatccttatttttgtcatgcctgtcacgcacaggcgttatcaccggtcgcgactagcgcagatcttgtaccgcaacgtgatccatgtcatcgaagacctgattttctcccaccatgccccaaataaacgtataggctttggtgccaacgccagaatgtattgaccagcttggggaaataaccgcctgttcattacgcatcacaatatgacgggtttcctgaggctgccccatcatatggaaaacgcaactgtcctcttccatattgaaatagaggtaaacttccatacggcgctcatgggtatggcatggcatggtgttccatagattaccgggcgccagttcggtgagtcccatactgagctgacaggtttccagtacatccggtacgaagtatttattgatggtgcgacggttactggtgaggttatcgcctaaggtgacgggcgcaacgtcggcaggcgacacttttttcgtcggataagcggtatgcgctggcgcgcagttgtaataaaacttcgccggtctgctcgcctcattgctgacgaagaccagctctttcgcccctttaccaatatacagagcatcacgatgaccaatatcatggcgctgcccgtcaacgataatggcgcccgcgccgccaatattaatgacgcccagctcgcggcggtccagtaaccgggaaacgccaagctgtttacccacctctccgccgatttcaacagaatggctgacgggcataatgccgccgacaataatacggtcgatatggctgtagaccatcgtatattcatcagcgacaaaaatattttctattaaaaactcgcgtcgcagcgcctgggtgtccagcgttttagcgtgctcgctatggatgctttgccttacgtccacttttccctccaatgataaatcgatcgcaatggcataaaattcaaaacactgttttgatttatttaacggcatcatagtcgcctggataaaggttttcaacaataaataaaacaacgtttcatttatatggttggttatttttaaaactgctgtagcgatcacgaacggcgctaaaacttacgcacatgtctgattttcagacatgtgcgccagatgctgtatgcggttacccagataaaaattggagcttgttttggaacggggtctgatgtgcgaattgaattaaaagcggtatgcgtctgcaatgcccgacgcggcaagacgttctgcgctataacgaaaaagggggttctgtcactggctttgccctcgtgatagagggctttttacaacggaatactgaagcaggaaaaggatggctggcgcaggatcagtcgcgttcaatggttaaagcaacgccctggccgccaccgatacacagcgtcgccagaccttttcgcgcgtcgcgtttaaccatttcgtgcaccagtgaaaccagaattcgacaaccggaagcgccaatgggatgccccagcgcaatcgcgccgccattaacgtttacccgtcgctcatcccattccagcatttttcctaccgacaacgcctgggcggcaaacgcttcgttggcttcgataaggtcgacctccgtcagttgccagccggcacgctccagacagcgccgggtagcatataccggcgcaatccccattagcgcaggatcgacgccgacgctggcaaacgcgcggatgcgcgccagcaccggcagccccagcgcctgggctttcgcctcgctcatcatcatcaccgcggcggcgccatcgttgattgaggaggcattacccgccgtcaccgaacctaaactatcaaacgccggatgcagcagggctaacccctccgcactggcgtcggcccgcggttgttcatccgtatcgacaattgcggtctgcccattacgttgcgtgacgatggggacaatctcatctttaaaacgcccggtatcaatcgcggccctggctttttgctgcgaactgagcgcataagcatcctgtaactcgcggctgatgccatattcccgcgccaggttttctgccgtcacgccaatgtgataatcgttgaaggcatcccataagccatcatgtaccagactatccaccagattgtcggcatcaggcaacgcgccggtacggctgtcattgaggacatgcggcgcacggctcatattctcctgcccgcccgcaataacaatgtccgcttcgccgcactgaatagcctgcgtcgccaggtgcaacgcttttaaaccggaaccacaaacgtcattaatagtaatggcggaaacggtagtcggcagccctcctttgatggctgactggcgcgccggattctgcccggcgccagccgtcagcacctgaccgaggatgacctcatcgatagcgttagcgtccacgccggtgcgctcaattaacgcttttacgaccatgctccccagctcgacggcggaatgacgggccagcgttccctgaaaacagccgatgggtgtccgtaaagcccccactatcacaacctctttcattaccacctcagcgcaaaatgacaccgccatagtagagcattgttaaaattagttatcttgattgtttaaaaaaagtgagttttatcacaaaggaaatgacgctgatttgacggtgacgcagcttatttctgctgcaaatggtagcgaagccagttccctgccgttccgggcggcgtcttcttgttccacagcaaatcaatagcaatcgccctcggccagccaggaacttccagctgggccagcggtttttccgccgcaaactcttccaccagcgcgcagggcaatacgcaccagccaaatccctgaaccgccatgctcaacagtaataaatagtttggcgctgaccaggccgggccgcgcgtaatgttggcattagattcaaggtaggtattcagacgcagctcgcgccaggtatgcagttgctcccattgcaggttcgtctgcgacgccaacggatgcgtggtcgccacataaacccccatccagctttgaacaggcagacgcgtcgcgccaatgtctgtgggatagtcatcacgcgcttcaatcaggcctatctgggcgcgccctttttgcaacaggtcgatgacatcatcattttctccgatcaagcattcaaactcggtatgcggaaattgacgatcaaactgcgccattaactcttccagactgtcagggtgcagggtatcagagaggacgaacgtgagtcttgcctccgtctcgccggataacgtcagcgccacctcatccaaacgatcgctcgccgataaaatagcctgaacatagctaagcacccgttttccttcttcggtcagaacgggctggcgcgaagatcgatcaaataatgaaaatcccagatccgcctccagatgcgcaatggcggtactaatggtggactggcttttacgcaggcggcgcgccgccgcagaaaacgaaccgcaagagacggtctcaacaaatgccattaacgcttcaggtgagtaacgcataacctatctactttatcgatggatattatcttttaggtatcacattaaacgataaaatagcggaaatttctttattttgattaagagtaaggttttttcgtttatgcaacatgacgccatacaacgtcgctcgctgccggagcgtattttccatgctgtctgttttgaaggtattgcgactgcgatactggcgccaacgaccgcctggctaatgcagcgctcggtgctagagatgggcggcctgacgatattgctggcaacgacggccatgatctggaatatcatttataacgctctgtttgatcgactgtggcctgcgcatcaggtgagacgaaccgccaaagtgcgcgcactccatgcgttaggatttgaaagtgggtttattgtcattggcgtgagtattgtcgcctgggtactgaatgtcagcctgctacaagcattcaccctggaaattggtttcttcctgttctttttgccgtacacgatgctgtacaactgggcatacgatgttttacgccaacgaatagtgactcgccgccaacagcgcgttagtgcatgatattgctcttttttgccgggatcgcaacgctcccggccctccgcctccacgacatccatctgcttaaaacgcccccaactgacgctatttatggtaaattgcgcttctttttgtgtgttttatagttgataaattcaaataatgtctaaaatttggtcaaaagatgagactctctggagttttgcattatacggaacggctgtaggcgcaggcactcttttccttcccatccagttgggatcggcaggcgcaatcgtgctatttattaccgcgctggtcgcctggcctctgacatactggccgcataaggcgctgtgtcagtttattctttcctcaaagacttctgccggtgagggaattactggcgccgttactcattattacggcaagaaaatcggcagtattattaccacgctttattttattgcgttttttgtcgtggtattaatttatgcggtggcgattaccaattccctgacagagcaattagcgaagcatattcagatagatattcgcatccggatggcagttagcttcggcgtagtacttatcctgaatatgattttcttaatgggaagacatgccactcttcgcgtaatgggctttttagtctttccacttatcgcttacttcttgttcctttcgctctacttaaccggaagctggcaaccctcgttactgaccgggcagatgtctttggatagtcacacgttgcaccaggtatggatttctattccggtgatggtttttgcttttagccatacgcccattatttcgacgtttgccatcgacagacgggaaaattttggcgatcaggccatggataaatgcaaaaagatcatgaaggtcgcctacctgattatctgcctgagcgtgctattctttgtctttagctgcctgctctccattccgccgtcatacattgaagacgcgcgcaacgaaggcgttaccatcctttccgcgctctcgatgatgcccaatgcgccggcctggctctctatttccggtattatcgttgccgtcgtggccatgtcgaaatctttcctcggcacctatttcggcgtcatcgagggcgcaaccgaaatggtaagaaccaccctacagcaggttggcgtgaaaaaaagccgggcgttcaatcgcgcgctgtctatcatgctggtttccgggattacgtttattatttgctgtattaacccgaatgccatctctatgatttatgccattagcggcccgctcattgcgatgattctgtttattatgcccacgttgtcaacgtacctgataccggcattgaacccctaccgttcagtaggtaatttcattacgttggtcgtcggtttactttgcgtatcggtgatgtttttcggctaaagtaaaagatagccgggatataactcccggctattttatataagaatccagcacctttaatattacgtccagatcttcttcacgtctggcttcatcactctgatgaacgatatgttcggtcagatgccctttaatcacctcgcgcattaagccatttaccgcgccgcgaatcgccgcgatctgttgtaacacggccgcgcattcatgcggttcatccagcattttttttagcgctatcacctgcccctgaatcttgctggttctggctttaagcttttgtttgtcccggatggtatgtgacattgcaacacctcactaacattaacgaatacaaattatagcattacgatgctactggggggtagtattccatactgggggggagtagaatgacacccacataaaacaactaagaatcattctcatgggtgaattttcgacacttcttcagcaaggaaacggctggttcttcattcccagcgccattttattaggtattttgcacgggcttgaaccagggcactccaaaactatgatggcggcttttattattgccattaaaggtacggttaaacaggccgtcatgctcggtctggcagcaacgctttctcataccgcgatcgtctggttaatcgcgctgggtgggatgtatcttagccgggcattcaccgcacaatcagtggaaccatggctgcagttaatttctgcgattattattctgagcaccgcgtgctggatgttctggcggacatggcgaggcgagcagcagtggctggcgggaaaccaccatcacgaccatgaccatgaccatgaccatgaccatgaccatgaccatgaccatgaccatgaccatcatggtcacatacatccggaaggtgcaacgtcaaaagcgtatcaggatgcccatgaacgcgcccatgctgccgatattcaacgccgttttgatggtcaaacagtgactaatggacagatcctgctgttcggcctgaccggagggcttatcccctgtccggctgcgatcaccgttttactgatttgtatccagcttaaagcgtttacgctgggcgccacgatggtactgagctttagtcttggcctggcattaacgctggtgacggtaggcgttggcgcggcgataagcgttcaacaggcagcaaagcgctggagtggtttttcgacgcttgcccggcgggcgccctatttttcgagcattctgattggtctggtcggcgtgtatatgggaattcatggctataccgggatcatgcagtaaatatgtaacgcttctgctcaggccgtatcattcacatcgggtttcattccagaagcgtttttacttatcaaacggtatgaaaggccatacattcagcgtcccgcctgaattctgtattttactccactacaccacaggcaaaaaataccccaccgccaccgggtttagccggcgtgtcagtgtttctggatagggtcgccggaggcgggttattgcggagcgataaacggagttcgctgcagtgatttacaaaaccgggtaccaaacagcagttcccgtaatcggttccgcattcccagcttcaccagtaaccggtatttgtcctgccagatttgcttctcctgtgtattcagccttccacacaacgctgacaaccttcctcgtccacggtaaacttcctgaagcaagcgtaactgggccaggctcactccgcatgccagtatctcccggtgcatcaactgatccatatagttcatcaaccgcttcggattgttaaatatcggtggcacttccagaaagcccgtcaccggatccggagataacaaaaaggcgtccagccctcctgtcctgcgcaggcgtgcgcccccggcccactgttcatcccgccgccaccgaataagtatctccgccagttcctgctccagcagcgccgggatgccgccgtataccttcagtaccacccggtcgctgaaaaacagctcatcgctgataatcataaccgggtagtccggcagtatctgtctcagggaatagaacaaaaagagatgttcacggggacgcagacacagtatcagtatggcctccggtttccgacgtaattgctgcaacagaacaggcagactgtatgcggtttcacagttgcagcccggcagaaatctccggaccaggtgtgccacggcgatcgtcaccggccagcagtcaccgtaaacgataatctgccgggccggcatccggttatgttccgtcatcctcatcctccttctttttcaggattttccccgcatttctgttactgcacagccggttccacagttcatttgccatcgacctgtcaccattaccgacccggcgttttgataccagcggcggtccggctttttcacggcgcgtggacggggtgggactgtcaagaacccggataacataaatctcatagcgtcgtgctttattaggcagggtctggtgacggcagatgctgaccacccgcgatgttttgcttcgcagataggcaatcaggtagctggcccgtctggccgtgatgtgaaacgcctctgctatctggttacgctgaacccagttctgctgcaacaggcaccagtgtgccacaatgatatacaggggctcgtcggcatactggcggacgctttccggaataaaacaggcatcatggttggtctgtccgggataatgaatatcgttaccaggggtaaggtactgcttttttgcgtgtgtattatcagggcacataaaacctctccataactgggtaaatgatttcccggaggtgaagaacaactcttaaatagtatttattattaatgtgggtttattcgggattagttccccgataactcagtcagttcttttatttttattatctgcccccccgattagttataggtaacagtaacgggtattgcagcagaaaacgttcctgtctttacacttccccccggggtcggggttattactgcagtatataccttcgacacattaccggtgacagctcctgtaatagtaatatcccccagtacttcttgtttatcaaaagtaatctcttttcctttatcatcttttattgaaagccggagtccattaggctgacctttgttggggccatccaggctgacaagattcagagtttgcccggtatcctgtgtcagtgcacctttcccgaaggtgatggccagagggatcgtgaattcctgtcccatagccggtcgtaaaacctgcgtggcgatcactgtaaaatttgcctgtctggtctgtgaaggttcataagtcgtataaatatgcccaaagttgacctgtaatggaacaatgtcaactttacccaatccgtttctgagaattctcacattaaaaccagataaaataaatccgttttgtctcaaagaataagaaaaaggtacaatatttaaaacattacttatccccgtaaaagctgtaactgcactactctctgaatatgcttttgtatataagaaatccagtgttatccttacttttcgttctgtagtcccaacaggtagttttgtgccaaactcttttcgtaactcatttcctgactgagtactctttatttcatcccaggagaacgaaacagcacttgaagcatttcctgtttctttaatggacattctgaatccaagtcccatcgcatctagtgtcttggtaaatttactgaagtagccctgattaaataccagctgtggaaattgcgtgtcatatcccatgtaacatttaaaaactgcatcctgattgattgtatagataaccgaatccgtgccaggtttaaaatcatcggttgtcaaatttatacttcttaaattaatattctgaccggaagtgactgcacattcatttatacctagctcaaccgcatacactttagtcacacataaagagcacaacatcatcaccagcacggtcagttttgttttcagattaaaaatccattctgtcatgatgtcgcccctgcgtccttaaacgcgcagttcagggcatcgcaggtgtagcgattcatctgcagtcccccgtaatcatcaatataccccacccacagcgtccgggtttctgccggcagaacagcctttaaaggcaggttccccaggggcggtaccatcacgccctcgcggaaaccgctgagcctgtggctacggtctgctcccagccacgccacagtgatgtagtacggcgtcgggtttctgagggtcagatgtcccgcattccgctcagcagtcagctttctttccggctggtcactgctgcttctgataatggctttcggacggtaaaacagtttcagctggctctgcatggccagttgcagaacgttgtcgtcttctggcttcgggggaacgccccgcacgttaaaccagaacagtgtttccctgtcctgagggagcttatctgtcagcccgcgaacctgggtgatgcggacctgggatttctgtccggcatcaatacgctgcagcggcggcagcgccatcagcgcatcggttctcaccccgtcagcgtccgtcacccaggactgcgccaggaacggcgtggttttgtcatcgttattcagcgtgatggccaccgttttctgcggcgcatccatgataatacgggtccggtcaacattgacggccgccgggctgtactggctccatgctgccgccagtgcgagtaaaatcacacggcttcttctgctgtttttcacctgttttctcctttagacctgctctgtgacagggatatttttatctgcagggcagtaacagcggcccccggctgagtgtcaccgtttccggcagggtgagtctgcactgcacccggccatcccaggacacattcagggtccggcggtcttccccgctgagacctgtcaggtaggccagaccgccatctccgaccatccccgcggttctgccggttttcccggacaccaccagggcgccaaacggcggacttgcgccatcagccagccggatatgaccgagcacctgctccccctggctggcgtcaatcttccggtagcccaccgcgccctccgtcagtacctgactgatgacggagctgctgacgtccacgtcctccggcagggcggccacatcaaccgaaatatcgctgcggcgatagctgctgccggcgctcaccacgcccaccccgaagcggttggtcaccccgctgttgccgttcaccggcacaccggccacgtctccggtatctatcatcatgcggggctcattcccggccatcgactggctgaaagcggcaccgtgggcggtggcagtcaccgagccgtaccagctcaggcccaggctgcggtactgtccgggctgcagggtggcgtccgctgccgcctggccccacggcagacggctctgcacgctgccgctgaagctgctgccggtgtcataacggttatgaccggcgctgatgttccatgtagtgtccgggttatggaaatcgctgtaattcacggtctgctgcaggccgccccggttatctttctgtacgctgtaactcacctggcgactgtctccccacgggatactgatggtggcgtagacctggttctggctacccccgccggtgtactggttacgggcaaacgacaccgaggccgagagtccctgaaggtcgccgagactgaacaccttgttgaggctgagcatgtagttattgttggactgtgcgttccagtaattgagccggcttaccgagagggccgcgctcatgttgagtaccggaacggactggctataagtcacggtgtagctctgtttttcatgccatgcatcgccgccgtcagtggtccgacgctgcaggtactccggcatggacagaaaatggcggtccgagaagcggtatccgacgaacgccagggtactgccggttttatcaaacgttttggcatagttgatacggtagctgtaaccggactgcttctgcccatgcggcaaccgcgcatctgagcgggtgacgtccgcagacagagcgcccaacagccccatattctggccgatcccgagcgccgcggactggtagtcgccggtggaggcaatgaggccgccatacagcgacgtgttgttaaatgctccccaggtggcctccccgagcagaaagtcagggctgaccgtgctgttgttatgcgtcccgccgtacagcggacgtccggcggccaccttatagcgaacctgtccctggcgtgccataaaggggacgctggccgtgttgacctgccaggtccggacgctaccgtcgctttcccggacgctgacatccaggttgccgctgatattctggctcaggtcgggaagctcaaaaggccccggcgacacccgggtctggtacagaatgcgaccattctggctgacggtgacctgtgcattactgttcgcaatgccgctaattttcggggcatacccctgaagagagggcggcagcatgcgctcatcgctggccaaagtgagcccggcaaagcggaaggagtcaaaaatagcggagctgaggtacgtctgtccgagcgtcagttttgagcgcagtgctggcaaggcacggaacagatacgtctgcggcagataaaaatcggactgtgatgcgccctgcccactgtcaaaacggctgtactggtaatcgctccgcaatcgccaggcgccgagattaaacccggcggtgccgtagaggctgtagctggtagaggtttccccctgctgcggcatatagcggttgaccatcaggctgtaatcaagcaggccggcggtgacgccgtcgctccagcgtgaagggggcacccagtccgggtcctgataacgcatccaggcctggggaataatgaaggtcagacgctgattttcagcgctgtaccgtacctgactgtcagcggagcgcagctcaaggcattgcccgtccgggataccggtaacgggtttcaggccatgaataatcttatccttaagacccagcatggccaccatgtctgttgtcacacagatgacggccgcgtcgcgtccggcaaccggtacaaccctgaccggatactgttcccgtaccggctggtcattgagccagatatcgagaatatagttaccgggcgccacatacccctcgcggctgaaggccgtgaggtccacgttagacaggttcccgctgtccagcaggctggcattgaactccgtggcctgcgacttcaggacggaaaatgtcagggtaatcagaatggcaagccgggtaattttcatggcatggcgctttcgtgttgtcgtccgtgtaacagacagcccgcaggcacagtcagatataaaagccgtccgatcccctccgtggacggcttctccctgtcgttatttaccgcgtgaaatcacaggtatttcagggtgtaggtgacggatgcgttgaagtcaccgggagtgacgccattatccagtgctattagtcgggcaaagaagttgagttcgttgtttccggcctgcagttgctgagcgtcgccatccggcatcggggtgttgggatcgataattgtggcgttgtcactcttcagtagctggacaccaacatgctgtgcgataccgctggtggtgtaagcctttttgctggtattcgctgcgccagagaaagatacggttactttggacattttccctgcggagccagctgtgtccggggtattcggatcgaaagcacagttctgtagatgaatggtgaacggttttgattccgtagttgcgtcggcggtattcagtttacggtaagaaatctgtccaaacggaacggtgatcgcatcgtcgcccggtgcgatatcacagggggagttggtgatggtgccagtgaaggtaattttacctgagccgaacgggcctgctgtgggtggatcgactgcatatacagaagcgccatacatcataccggcagccgccatggcaagtattattttattacgcatagataatatgtcctttgggtaaatgagaattattttgcaaaggctgaaaacaactctgagggtattaatgaaagcgttcagaaaagattcgtatgaataataaacgcctggtgttaaacgaagcacctgaactttccatcgaaaaatattgatttcagctaatgcctaatcagttgtaagaaaattcttattcaaattaaaacaataaaaatagatcgatacgatcgatgattatgatcgtaatttaagaataatcatcaaagaaatactttttaatgtaattataagcgggtgaatacctaacagacagatattcgcagcggacatgaaatattttgtaatatattatcgggaatgtatgttttgcttttccattacactggatatttacaaaacataatactaatcatatataacaatgaaattactggcagcataaaaaactggatataacgcaagtaaaaggcatttaattccaaaacattaacttaataaatcattatgaaccatcataagtggaaggaataaaaaataataaatgaaatgatattcttctgtatttgtgatgagcatcacaatagatataaatgcaggtaccctgacatttctaaacttcgcggatgaaatttaaaaacaatgccgacagcaaagaacaaactggtaatagctgtcagacataatgctgcctgctgtaatgtatacagcaggctgggggatattaatgcgcggcgtcgtgctgcacggagtgcgtgggtgattcctgaactgactgagagtctacaactatgccatcctgagctgatttcagtaatagacctgcctgatagtattttccttcgttcatcaaggaaagcgctgtggtcacatccttacgggtttgctgaagaggaatgagttcctgattttcaataacactgacgcctgctagtttcagggcctctatagtcccttttttatctccttctttcattttctggtttgctttattaatagcatcatttttctggcccgcagggagataatcttctgctaccgtaatcgatgaatttatccgaatatagtggtctccttcaactggggcttttttatctgatttgacatacagattccagtcagtgctgtcatcgttcaggagtttttctgcttgcgcagccagttgttccgccttttgggtgcgaccattaaacaactcgaatcgcgacattccgatatcacgcatggcctgccaggcctgtccggatatcttgtcattattcagagtaacgttatcagtcatgtttgttgcggccataatatttcctgaaaacaggataaccatcagcgcaacgcctggcataatatggcttttcataatccatcatctccacaaagtaacattttttatcggattatcctattcagaaccggtaacccacgccaagattaaaaccattgctattaaggcttccgctgttatgggtagcatcaaaatccgctccctcataacccagagttatagcgacactactgaccggggtataagccacgccagcagaataaccatatccgaccttactgtcagactcatttatcccgtgatcacgctgatgcaataatacggggcccacttgactatacagacttaactggttatttattttccatgaggggcctgcaagcagggagtaataacgggttgttacacgaccattactgctttcatcggaatagcgctggcttccatttagccatgcaaatgaggttgtcagcccccagtccggtgacatttcatagttgtttgccagccgtaccccacgcaacgtcccggcgtgattagtatgggactgggcgtatccaagtgaaaatgtactggcattatcgtctgcccataccggactggctgcagcagacagcagaacaataccggcacttccggctaatagcattttgttcatcttcttctctccggttatttttacctgatgccttactggcatgtattaagttaaaatctttccgtgataacaaactataaataaatcttttaaattatgagcgctgttacgccagcaaatacctttatctccggctgtcgggaggctattcacgaaaatatatccaggccagaaacagaatttaataataaataaactgaaaaataaaaactgacaaaaatagaagttcactgatatatacccaaaataattcgagttgcttaaaggtggcaagggagtgagtccccgggagcatagataactctgtgactggggtgagcgacaattctgccgggagcagatttgaacgtcgcgtgcgacggcccgtcagggcgaggcccatggatggaccgagtaatccgtagccaacacataagcaacttgaagtatgaaggatatataacgggaaagaaggcatatcggcctggtaaatcaacgtctgtgatttaagttgcaggaaacggctatggagagggggggggcggcagttatcgggcagtaacggcattgttcagtgagtatccaggaaacaaaaaaagaagggagcggtactcccttcgtaaacatgtcagaatacgacattttggtactcttttatttattatctggccgtaaaagttatgctgttggcagatatctccagtcaacataaaaaaataccaccagctaaaaatgtgatgcaaaccaccattaagcagctaaccaaattgactgtgccactaaatccggaaaagagtttgaatccggggataacatctgatgcagaaattagcaccagtcttcgattcggatacccggaatgcgttcaaattcgcggagattgtttgtgacgacgaccagtccgcggctaccggcatggccagcaatcatctggtcataaggcccgacaggtgttcccttgcgggccagttcggcacggatttgaccggtatgtatcgctgcctgtgtatcgtaatccagaacctcaaggcgggagataaatccctccacgacggcaagattacgctccggcgccaggcttttttcagcaccgtaaatcagctccattaaggtgatggagctgatacacattcgggatgtattgaggttgaagcgttctctgatgtgttcgggcttatttttgatggtgaaaatacaggtattggtatcaagcatgaatttcagcatcaaaatccttcccgttcctgtactgcgggttgttctctggtactcataaaatcagtactggcgccttcgccatcgaaccagctgtcccaggattctccgactggagtaatgattctgcttctaccaaccgcaatgatttcgacatgtttcacatcctccggaaaggatatcgatttaggcaatctgactgcctgggtccggttactaaaaaaaagtgttgtgtgcataactgcctcctttctggatatacaacgcgtatatccattatgagtagaggcgatgtatatgtcaaagagatatacaggaaaaaataatccagtcgcttaacgcgcactccgcagggcatccttgtccaaccccggcaatcggggaaaacgagtttccccgactccggcatttctgaatacatccaatgaaggaaataccatgcaaacaatgcataaaaaacatatgtgccgatggcttctgcccggtttgctcggtctggctctgtgtgcgccagtaccacatacttacgcagccatcattgaggcaggattttatccggaaggtacagatctccagcttgttcttaagataattgagaccgcgcgacaggaaatccgtctgatggactattccttcacctcttgggaggtggtccggttcgaacattcagtgagtacaaaattctccatgtcaaagtgatcgtcagcgacgaccgccacaccgaggtggacgcgtcagaatcgctgatcggacacgtcgcaatctacactctgacttataagccagcctgaaggggcatgttggctttgacgatcaggcaaaaaacaacggcgaataaaataaagtcgtatgatgatcttcacatttatcatcatcagcgttcatattactcaacctgtaatcaacctctggcgtttttctgtattcatcacaaccatttccggtaaaggtaaaaaagggatttgaacctttccggagatgataatgaaggtaaatacatggacaattttgcttatgtcggcgcatctgacggcctgtgccgtccctggcacagaaaaatatcagaccagcatggacagcgttacggcagaaaaaataagccggattatccagtcggatgtcattccttataaaggcgaaaaccatggagaagttatcagccgcgtatcgtctgcttttctcggaacaccttatcaggcggatacgctcatcggtgggcccggcatccccgaagtccttgtagcgaatttcaacggcgtggactgctttacactggctgattacgttgaagccctggcccgcagcgataatcagaaatcgtttctgcataatcttgccaggactcgctacgccgcgggcaaagttgcttatctcagccgccggcacttcttctctgactggttcgccgcaacaccgcgtaatgcacgggatgtaacgccggatatcagccctgattatgtcgttgttgacaagcagcttaaccataaacctgatggcggcgagtacattcctggtctgggcatccatcctcgtaaaataaattacattcccggaagagccatcaaccagcaggtcatgaaccacctaaaaaacggggattatatcggtgtctactccccgcttgacgggctggacgtttcacatgtgggtatcgtagttcgccatgatgaacaggtgtggttcaggaacgcctcctcattggccgcaaacagaaaagtggtggatacaccgtttatggaatacatgcattccagaccgggcatcgttgtgttgcgggctgaatgataaagtcattaccggagtcgccagctgataatagccgtccgacataggtattgaaaccctgtgtactgtggggccgacacgggaaattgctgtaaattcgtggttttagtaaatactagaagatatttgtctggagcgggcgaagggaatcgaaccctcgtatagagcttgggaagctctcgttctaccattgaactacgcccgctttgagatgcgtaaggcattataaaccttacgctctggttggcaagagacttactggctgactggcgattaattcgccgtcagcacttcggtttactcccctgcggcggcagataacgcagcggatcgatggccgtcgcccggtagcgaatctggaagtgtagtcttacggatgcagcatccgtgctgcccatcgtagcgattttttgccccgctttaacgctttgtccattattaaccagcatggtgtcattatgagcgtaagccgtaatgtaatcttcattgtgcttaatcatgatgagattgccgtaaccgcgcagctggttcccgacatagacaactttacccgctcccgccgcataaacaggcgttccgcgcgcgcccgcaatatcgatccccttatttccgccctccgcggtggaataaggtaaaatcactttaccgttagcaggccatacccaacaacgctgccccaccggcggccaggaggattttggcaccgaagatgacggtctgaccgcagcagtttttgttgctgttttattgctggttttgcgtgttgaactgctactctttgcgctgccgcgcactttaattcgctgccccacctcaatagtataaggcggagaaatgccattcagtcgggccagttctttcacgctggttcccgtagcgcgcgatatacgatacaacgtatcgccgcgcttaacggtatagacggagccggaatacgttcctgagccggaattactggaacaccccgccagcagcagccctgtgcataacagcaccgcaatacccaggctatttttgttcaggcgtcctgcgctcaaaaccattcctcactctattgacagacgccttatgatagcagccaaatgccgtatgcccaatccattgacgccggaaagggtccgcgtggatgatgatgccgcgaatatccgatatgccagcataatatcgactcacggcacaatggcgctcgtctgcgttctgtcagggcctgttttggtaatgcctttctttctgttatgcgctacgctgatcgtctgagtatatggcctggccatgctgccgggtcattttaattttcaggagctttcatgactgaggaacatgtcgttttattggatgagcaggataagccttccggcacactggaaaagtatgcggctcatacgcttaatacgcctttgcatctggctttctcctgctggctatttaacgaagatggccagttgctggtaacacgacggtcgctgagcaagaaagcctggccaggcgtgtggacgaattcggtttgcggtcatccgcaacaaggcgaaaccaccgaagaggcgatcatccgccgttgtcggttcgaactcggcgtggaaattaccgatctcacccccgtctatccgcacttcagctatcgagcgacagatccaaacggtattgtggaaaatgaagtctgtccggtatttgccgcgcgggcaaccagtgtgttacaggttaacagcgaagaggtgatggactatcagtggagcgaatttaaaagcgtatggaaaagccttctcgctacgccgtgggcatttagcccgtggatggtcatgcaagcgtcagacgaacaagcgcgtgaacgactgctcaattactgccagcgttaaaaattgcctgatggcgctacgtctgaacgaagagatgccggatggcggctaatgccccatccggcaatttacatcttatttcaccggacgcatcgccgggaacagaataacgtcgcgaatcgtgtggctgttagtaaacagcatcaccatacggtcgataccaattcccagacccgctgtcggcggtaacccgtgttccagcgccgtcacgtagtcttcgtcgtagaacatggcttcgtcgtcgcccgccgcttttgcattaacctgatccaggaaacgctgcgcctggtcttccgcatcgttcaactcgctaaagccattaccgatttcacgaccgccgataaagaactcgaagcggtcagtgatttccgggttcacatcattacgacgcgccagcggagacacttcagccggatattcggtgatgaaggtcggctgaatcagatgcgcttcagcgacttcgtcaaagatctcggtgacgatacggcccagaccccagcttttctcgacgtgaatgccgatgctttcagcaatcgccttcgcggaatcgaagttgtccagatcagccatatccgtttccgggcgatatttcttgatcgcttcacgcatggtcagtttttcgaacggcttaccgaagtcaaacacttcatcaccgtacggaacctgggtggtgcccagaacatcctgcgccagcgtacggaacagagactccgtcagctcgatcaggtctttgtagtccgcatacgccatatagagttccatcatggtgaactcaggattatggcgcacggagatgccttcgttacggaagttacggttaatttcgaatacgcgttcgaagccgccaaccaccagacgcttgaggtacagttccggcgcgatacgcaggtacatgtccagatccagcgcgttgtgatgggtgataaacggacgggcagacgcgccgcctgggatcacctgcatcatcggggtttcgacttccataaagccgcgagcaaccataaactggcgaataccggccaggatcttcgaacgggttttgaaggtgttacgggattcatcgttagagatgagatccagataacgctggcgatagcgcgcttcctggtcctgcaagccgtggaatttatccggcaacggacgcagcgctttcgtcagcaggcgcagttcggtgcagtggatagacagctcgccggttttggttttgaacagcttacctttcgcgccgaggatatcgccaagatcccacttcttgaactgctcgttgtaaacgccttccggcagatcatcgcgcgccacatacagctgaatgcggccgcctacgtcttgcagggtaacaaaagaggccttacccataatacggcgagtcatcatacggcccgcgacggacacttcaatattcagcgcttccagttcttcagcttctttcgcgtcaaactctgcgtgcagttggtctgaggtacggtcacgacggaaatcgttcgggaacgggataccctgctcacgcagtgcagccagcttctcgcgacgtgccttcatttcattgttaagatcgactacctcgtcagcgccctgtgcgttttgttcagacatgttgattcctcatagccctgctttcaaacttgcttcgataaattgatccagactaccgtccagtaccgcctgtgtattgcgggtttccaccccagtacgcaggtctttaatgcgggaatcgtccaggacataggaacgaatctggcttccccagccgatatcggacttagtgtcttccatcgcctgtttttcagcgttctttttctgcatctccagttcataaagcttcgctttcatctgcttcatggcctggtctttgtttttgtgctgcgaacggtcgttctggcactgcgtcacaatcccggtgggaatatgggtgatacgcacggcggattccgtacggttaacgtgctgaccgcctgcgccagacgcgcgatagacgtcgatacgcagatccgccgggttaatgtcgatatcgatatcgtcgtccacttccgggtacacaaacgcggagctaaacgaggtatgacggcgaccgccggagtcgaacgggcttttacgcaccagacgatgtacgccagtttcagtgcgcagccagccataggcatattcgccggagattttgatagtcgcggacttaataccggcgacttccccttccgattcttcaatgatttccgtcttgaagccgcgcgcttccgcccaacgcagatacatacgcagcaacatgctggcccagtcctgcgcttcagtaccaccggaaccggcctgaatatcgagatagcaatcggcgctatcgtactcgccggagaacatccgacggaattccaactgcgccagtttctcttccagcgtattcagttccgcgacggcttcgttaaacgtctcttcgtcgtcagcttctaccgccagttccagcagcccggaaacgtcgtccagcccctgagtcatttgatcaagcgtatcgacgatcgcttcgagcgatgaacgctcttttcccagcgcctgcgcgcgctcaggttcgttccagacatccggctgttccagctcggcgtttacttcttccagacgctctttcttagcatcgtagtcaaagataccccctaagaacgttggtgcgttccgtgaggtcctgaatgcggttattcaccgggttaatttcaaacatggtctgatttcttttatttgacttgtcaaaatgcggttataagggcgaaatattagcggatttcgccccttaattacagcgaaagtgttgttaaatcgccccgatcatagcggccaaatatcatcgataataatctgtaaactacggttgccgcgaaactcgttaatgtccagtttataagccagttctacctcccgcacgccgttatccggccaacaggtcgtatcaatattaaatgcgatgccatccaacagcgggccgccgccgacaggctccaccatcaccttgaggtgacgctcgcccaccagacgctgctgtagcagacggaaacgaccatcgaataacggttccgggaacatttgcccccacggtccggcatcccgcaacagttgcgccacttccatagacatctccgccgcgcttaatggaccatcggagatcacctcgccttgcaacagggcaggatcgagccattccgtcaccagctcgccaaaccgttgctgaaactgctcgaatttatgctcttccagcgacaatcccgccgccatcgcatggccgccgaacttgatcatcagatcagggtaaagggtatccagccgttccagcgcatcgcgcatatgcagcccctgaatcgatcggcctgagccttttagcgtgccgtcgcccgcaggcgcaaaggcgatcaccgggcggtgaaaacgctctttaatgcgcgacgccagaattccgaccacgccctggtgccattcaggatgatacatcgccagaccgcccggaagcgtttcactactgcgctcaagcttttcgcacaggataagcgcttccgcctgcatcccctgctctatttctttgcgcgtctggttaagcgcatccagctcgctggccagaacacgcgcttcgccgaggttgtcgcacaacagtaacgccacgccaacggacatatcatccagcctgccggcggcattcaggcgaggccccaacgcgaagcctaaatcactggcggcaagctgctgcggatcgcgattcgatatctccagcaacgctttaattcccggacggcatttcccggcacgaatacgacttagcccttgccaggtcagaatacggttgttagcgtccagcggcacaacgtctgctaccgttcccaacgccactaaatccagcagctccgccaaattcggcggcgcaatgttgcgctcgtcgaaccatcctttgtcgcgcaaaaatgttcgcaacgccagcatcaggtaaaacgccacgccgacgcccgccagcgacttagacgggaattcgcagtcgcgcagattgggattaataatcgcttcggcctccggcaatgtatcgccaggcaggtggtgatcggtcacgatcaccggaatccccaacgtctttgcatgcgctacgccggcgtgggatgagatgccgttatctacggtgacgataagctgcgcgccgcgcgccttcgcctgatcgaccacttccgggcttaaaccgtagccgtcctcaaagcgattaggcaccagataactgatgttgtcacatcccaacgcacgcattcccaatacgcttagcgcagtactggtcgcgccgtcggcgtcaaaatcgccaacaacaataatgcggataccttcgcgaaaggcgttgtagaggatctccaccgcgttatctatgccgctaagctgttgccagggcagcattcctttcacgctgcgctccagttcgcgggcgctacgaacgccccggctggcatataaacgtcgtagtaatggaggaagatcggcggggagttccgccgtctcatcagcctcgcgccgacgaagttgtctctgttgtttcacgcgtattatttaccactggtctgtttttgatgctcatcaagaaacgctttcatctctttcggtccctgatagccaggcaccacatagccgttactcaatacaatggctggcgtaccgctgacgcccaactgcacgcccaacgcataatgatcagcaatgttcacgtcacagcttgccggtttcacgcccttacctgccatggcgtcatcaaacgctttgtttttgtctttggcgcaccagatagatttcatatcctgctccgcctggctttccagcccctggcgcgggaaggccagataacgtaccgtgatccccagcgcgttataatctttcatctcttcatgtagcttatgacaatagccgcaggtgatatcggtaaaaacagtaatgacatgtttctcatccggcgctttatagacgatcatctctttttccagcgcatttagctggctcatcagcagtttgttcgtcacgtttaccggatgcgcgccgctcacgtcatacatcggcccttgaataatatgtttgccgtcatcagtgacgtacagtacgccgctgtgagtgaggacggttttcatccctgccactggcgaggcctgaatttccgtactctgaacgcccagcttagccagcgactgacggatagccgcatcatccgcatgggccacgcctgaaaacgccgccgccagtaaagtgaacatcataaaacgctttttcataaactatcctttcctgtcagcactcatgcccgcggatggtgctgttgatgaagttgacgcaaacgctccgttgcgacatgcgtataaatttgtgtcgtcgaaagatcgctatgcccaagtagcatttgtacaacgcgcaagtcggcaccgtgattcagcaaatgcgtggcgaaagcgtgacgtaaaacatgcggcgatagtttttcgctatcgattccagccagtaccgcataatgtttaatacggtgccagaaggtctgccgcgtcatctgctgcgcacgctggctggggaataatacgtcaatcgatacgccattgagtaaccagggacgcccatgctccagatacgtttccagccaatataccgcctcttcacctaacggcaccaaccgctctttattgcctttaccgataacccgcaccacgccctgccgcagactgatatcgctcattgtcagccccaccagttccgacacgcgcaaaccggtggcatacagcacttccaacatagctttatcgcgcagctccaaaggttgatcaataagcggcgcctgcaagagccgttcaacctgcgcctcgctaagatctttcggtaaacgctgcggaagcttaggcgaggccaactgcgcgctcggatcatcctcacgatacttttcacggtacagatgctggaaaaagcgccgcatagcgcttaacaggcgtgcggagctggtcgctttgtatccgccctccacccgttcagccaatagcgtttgtaaatcatcagcctgcgccgtcgcaagcgtttttccgcgatgatgcaaccacgcaacgaccatcgataaatcgcgacgatacgcgcttaatgtattttccgccagatttcgttccagccacagggcatccagaaactgctcaatacgcgctaaatcctgttccattcgcgctccctacttcacgcttacttttggtgcattatgcctcattgtgccgtgaatgcagtgattctgttacactacccgcaacgctatagcagaatcgagatgtaacgtaatgaacatgggtcttttttacggttccagcacgtgctacaccgagatggccgcagagaaaattcgcgatatcctcggcccggagctggtgacattacataacctcaaggatgacgcccccgccttaatggagcagtacgacgtgctcattttaggcatccccacctgggattttggcgaaattcaggaggactgggaagccgtctgggagcaactggacgatctcaatctggaaggcaaaatcgttgcgctttacggtatgggcgaccagctcggctacggcgagtggttcctggatgcgctgggtatgttgcatgacaaacttgccctcaaaggcgttaaatttgtcggctactggcccacagaaggctacgaatttaccagcaataaaccggtcattgcggatgggcaactgtttgtcggcctggcgctggatgaaacgaaccagtacgatctcagcgatgagcgtatacagacctggtgtgaacaaattctcggcgaaatggccgaacactacgcctgaaaccttactcgctgtacttccctctcgacggaaccgcgtttacgccgttccgttagtgttggcctgatatcggctgctgtaacagtatccgacgcaactcacgccattccgcttcttccatgctatccgccgccagccataaatgctgatgacgtccagactctgcgcgtaaacgcaacaccatcccgctcttcagtaaccagggcggacgcaagagcgtccagtcctgcccctgccagcgtaagcgcccgtccatgagtagcttgatctctccctggcaggtattaatcctgcgctggctacgtacacagtcaaacacgaccagcgacagtagtatcatccataacggggtataactcagcggccagggcatcaataaaatcaccgcggcaaccagcccatgaatgagcaatgagatccactgagcgcgccatgagacgcgtaaatcagattgccacaggaccacgttcccgattccgtgtctgaatgagtcggaccatctgttccagttcagcgtcagccggtttaccgtgattcattaaccagttaaataaatccgggtcgtcactctgcaacaaacggacaaaaatacgcttttcttcatcacttaaactatcgtactcatgttcaaaaaacggcatgatggaaatatcaagttcgcgcataccgcgacgacatgcccagtgaatacgtgctttattgtgaatatccatgttcttcctgcctcgcgaaaatgaagtaccgggctattgtaacgtgtttttggcgttgttttacgggaatctcagtaatctggaacgcgatcgcgaaataaaaggctgggaatcaatatgttcatccgttttggataccgcctcgcaaaacgatcaatccgctctcaatgggctatttaaagcacttgcaatgaccgatggctcttttaccattaaccattattgttgcagctaaccaggacattatttatggcttttatctcctttccaccacgtcatccttcatcgtcagcccgcctgccgctgacgctgatcgcgcttgacgactgggcgctgtcgaccattaccggcgtagacagtgaaaagtatattcagggccaggtcaccgctgacgtaagccagatgactgaacagcaacaccttctcgccgcccactgcgatgctaaaggtaagatgtggagcactctgcgcctgttccgtgagcgcgacggtttcgcctggattgaacgccgtagcgtgcgtgaagcgcaattaacggagctgaaaaagtacgccgtattttccaaagtagtcatcgcgccggatgacgaacgcgtattgcttggcgtggcaggttttcaggcccgcgcggcgctggctaatgtctttagcgaactgcccaatagcgaaaatcaggtggtcagagacggcgcctccacgctgctatggtttgaacatcctgcggaacgattcctgcttgtcaccgatgtcgcgacggctaacatgttaacggagaagttgcatggcgaagccgaactgaataacagtcaacagtggctggcgttggatattgaagcaggcattccggtgattgacgcggcgaacagcggtcagtttatcccccaggcgactaacctacaggcgctgggcggcatcagcttcaagaaaggctgctacaccggacaggagatggtcgcacgggcaaaattccgcggcgccaataaacgcgcgctttggttgctggcgggcaaagccagccgggtaccggaagcaggagaagatctggagctacagatgggcgagaactggcgtcgtaccggcgctattctggcggcgacgcagttggacgatggtcagttactggttcaggccgtcatgaataacgatttagaagccgaaagcgtcttccgcgttcgcgacgatgccaacaccctgcatatcgtcccgctgccctactcgctggaagagtgatatcacgttaaaagccggatagcctgatagcgcaacgccatcaggctcgcacgtgctgttctcgtaggccggataaggtacgacagcgccgccatccggcacgggcatccgggaattatgcctgtcccacatacaaatagatggccaggaagtggcacacgctgccgcccagcacaaagccatgccagatggcgtggttataaggtatgcgtttgcaaacatagaaaattacgcctagcgagtaaacgacgccacctaccgccagcagcgtcacgccgcctatcgccagcttaatcgccaactgataaaccactatcagcgacagccagcccattgccagatacgtaaccagtgaaagcactttaaatcggtgcgcaatcgtcaacttgaagaggataccgaatagcgccaggctccagatcacaatcattagtccgcgcgccagcggcgaatccagacctaccagcagaaatggcgtataggttccggcaatgagcagatagatagcgcagtgatcaaatttctttaaccagatttttgcccgctgatgaggaatggcatgataaagcgttgaggcaagaaaaagcaggatcatgctcccgccatataaactgtagctggcgatagccgtcatacccgcattcgcctctaccgcctgaaccaacaacagcaccaggccgacaataccaaataccaatccaatgccgtggctaatactgttggcgatttcctcagccagcgaatatccctgcgtcattaatggtttttgcaccataacttactccggagaaacgttcataacgatgaacttcgcctctagcgtaactgagaatggttccagtgaacacatgttagctaaaataaattcgcaaaattaaattttctttcttattcaataatttaatcacagaaactcaactaacacgcgttcatatttatcaaaggcatttaaaatcaatcacataaaattgcgtctggttgggatagatttcagcaatgacccgtttcagctcatcaagcgacatattttcctgttgcgcatgtttttcgttcagcgtatccagcgtcacagttgacgttcctgtcacttcaattgtgcaaaaatagccatcatcttcgaaccgccccacgcgtagcacatcgcctgctttaaagtgggactcggaggcatcacgaatagtgatggttttacgccctgccagaatgtcattctggaaacgttgaaagaaagtaatgtcgtttggctgcatgtggttatcccttgaatatgccccgttgaagtgaatgttacgatctgaatatgttcttgtcccgacacgcgagcaccctggaattttgcgtacgctttacatgtcatttggtgcagaatgaatgataacagactaaataaattgagattatgcaacaatgagaaaactcaccttgccaaaagattttttatggggcggcgcggttgctgcacaccaggttgaaggcggctggaataaagacggtaaaggccccagcatctgcgacgtgctaaccggcggcgcacacggcgtgccacgcgaaatcacccagaatgtcgttgctggcaaatactatccgaaccacgaggcggtggatttttacggacattacaaagaagacatccgtcttttcgccgaaatggggttcaaatgcttccgtacctctattgcctggacgcgtatcttcccgaatggcgacgaatcccagccaaacgaggccggtctgaaattctacgacgacatgtttgatgagttactcaaatacaacatcgaaccggtcatcaccctttcccactttgaaatgccattacatctggtacagcactacggcggctggaccaatcgtaaggtcgttgatttctttgtccgttttgctgaagtcgtgtttgaacgctacaaacataaggtcaaatactggatgaccttcaacgaaattaacaaccagcgaaactggcgcgcgccgctgtttggctactgctgttccggcgtggtgtataccgagcatgagaatccagaagaaaccatgtatcaggtcttacatcatcagtttgtcgccagcgcgctggcggtaaaagcggcacgtcgcattaacccgcagatgaaagtgggttgtatgctggcgatggtcgcgctgtatcctttctcctgtaaaccagaagatgtgatgtttgctcaggagtcgatgcgtgaacgctacgtctttaccgatgtgcagctgcgcggctattacccgtcctatgtgttgaacgagtgggagcgccgcggatttaacatcaaaatggaagatggcgatcttgaagtgctgcgcgaaggcacctgcgattatcttggtttcagttattacatgaccaacgcggtcaaagccgaaggcggtagcggcgatgcgatttccggttttgaaggcagcgtaccgaacccctatgttaaagcatctgactggggctggcagattgatccggtgggcctgcgttattcattgtgtgaactgtacgaacgctatcaaaagccgctgtttattgtcgaaaacggttttggtgcttacgacaaagtagaagaagatggcagcatcaacgacgactaccgaattgactacctgcgcgcccatattgaagagatgaaaaaagcggtgacttacgatggtgtcgacctgatgggctacacgccgtggggctgcatcgactgcgtgtcgttcaccaccggtcagtacagcaagcgctacggcttcatctacgtgaacaagcacgatgacggtacgggcgatatgtcgcgttcgcgtaagaagagcttcaactggtacaaagaggtgattgccagcaacggcgagaagctttaactcctgcacgttacccgccagtcggcgggtaacactttgaacgagtcttaccaggtcttacctattttaaattcccagcgtacatcttccattttggttggcgacttcgcttcctgcattaccgggaagaaggctccggcaccaaaccataatttcagtgaatcgacggcaatattaaatgacggaccaacaacccattcggtagttccagaatggttattaattacgctgccattagacagttttttcgttccagaggcattattgctgtaggcactttccagaccaagatccagcggtaaatcgctaaacatataccgcacctgggtattccactggaattcgttacctcgtttcacgtcctggttaccgcgctcaaatggtccctgatagacaaaacccatatcccctttaatgttaggagtaaataattttgttaaagtgagtgttactcttcctccccaggcgctattcccaggcaaatgattatctccatcttgcccggtgggtagtaatactgccccacctaccgtaacccaaaacggatcacctcttcgctggctcattaaagcataattgacccccactgattggtcgcccattccctctatgtgctcaggagacagattgtctcgtttgttattgatataggaacccacagttgataattccagtctgtcggtcaaaccgtaacgaatcttcaataaccatatctgggagtaaacatccggacttccgtgcccctcgatttgatgatctttatcgcgaaatgagctattcacggcggttaataactttccttccggcaatactgaaccaccagaaatagcagtattaactggtgcacctaatagattactgggattattttctccgttagctgccattgcattcattaatagaaaatatgtcattaatggcagaaatataaatcgtttcattattccctccaggtataaaaaacaaagcgctaagttaataaatatttacgttatttatgtttatttttaatttataatttaaattaacaacttgatgaatttaatatacggaaatttttgtaactatattgagaggtaaataacgattccggagagaaactatttgtaactacatgtaaatatactgtgttgttttgattaaataacagcaaggtaaaaatgatgcacaatgaatcattaggctctaaaaaagcggtaatttaattctggctaatacactgatacaaacgccaggttgcctgacaggagccaacgatttagtgtaatatattgaattattaacactttgtagcctgaataaggcactcacactgcatccgacataaacaaagcgcactttattaacaagctgaaaaggcgccgaagcgcctttagaaaacagtcgaatcagtaaattactggtagtcgctaatcggtacgcaggagcagaacaggttacggtcgccataaacatcatccagacgtttcaccgtcggccagtatttgtctgccacgcctgccgggaatacggcaacttcacggctgtacggatgcgcccactcggcgaccagttcgctctgaatgtgcggcgcgttcaccagcgggttatcttccagcggccagacacccgctttcacctggtcaatctctgcgcgaatagccagcatcgcatcgataaagcgatccagctcagccttaccttcagattccgtcggctctaccatcagcgtgcccgccaccgggaacgacatggttggcgcatggaaaccgtagtcgatcagacgcttggcaatatccagctcgctgatgccggtttcttctttcaatgggcgaatatcaagaatacattcgtgcgccacacggccatcgcgaccagtatacagtaccggataggcatctttcagacggctggcaatgtagttagcgttaagaatcgcgacctgacttgcctgcttcaggccttctgcgcccatcatgcggatgtacatccagctgattggcaggatagaggcactaccgaacggcgccgcagaaaccgcgccctgacgggttaacatgccttcgatttgcaccacgctatggcccggtacgaacggtgccagatgcgctttcacgccgatcggtcccatgcctgggccaccgccgccgtgcggaatgcagaaagttttatgcaggttaagatgcgaaacgtccgcgccaataaagcccggtgaggtaatgccgacctgggcgttcatgttcgcgccgtcaaggtaaacctgaccgccgaactggtgcacaacttcacacacttcacggatcgtttcttcatagacgccgtgggtggaaggataagtcaccatgatgcaagagaggttcgcagcatgttgttctgcttttgcccgcagatcgtccaggtcgatgttgccgttcttatcacaggcgaccaccaccacctgcattcctgccatatgtgcagaagcagggttagtgccgtgagcagaggccgggatcaggcagatatcgcgatgcccttcgttgcggctttcgtgatagtgacgaatcgccagcagccccgcgtattccccctgtgcgccggagttaggctgcatacagacggcgtcgtacccggtgagtttcaccagccagtcagaaagctggctaatcatctgatgatatccttcggcctgttccggcgggcagaacgggtgcagttcagcgaattccggccaggtgataggaatcatctcggcggcggcgttcagcttcatggtgcaggaacccagcgggatcatcgcctggttcagcgccagatctttacgctccagcgagtgcatatagcgcatcatctcggtttcgctgtggtaacggttaaataccggatgcgtcagaatcgcatcgtcacgcagcatactttgctgaatggaacggctatcaagcgccacgtctttatccagtgtttcaatgttcagaccgtggctgccgcccagcaaaacattgaacaactgcgccacattctcacgggtggtggtttcatcgagcgtaataccaaccgcgttatgaatatcgctgcgcagattgatctctgccgcttccgcacgcgccagtaccgcagctttatcagccacttccacacacagggtgtcgaagtagtgcgcatgacgcagctttaagcctttctgttgcagacctgccgccagaatatcggtcaggcggtggatacgattagcgatgcgcttcagaccaaccggaccatgataaacggcatacagactggcgatgttagccagcagtacctgcgaggtacaaatgttggagttcgctttctcacgacggatatgctgctcgcgagtctgcatcgccatgcgcagtgcggtattgcccgccgcatcttttgagacgccgataatacggcctggcatggagcgtttaaattcgtctttggcggcaaagaacgccgcatgcgggccaccgtaccccatcggtacgccgaagcgttgcgcagagccgaaaacaatgtccgcgccctgtttacccggcgcggtaagcagcaccagcgccataaagtcggcggcgacgctgacaatcactttacgggctttgagttcgctaatcagcgcgctgtaatcgtgaatttcgcccgtggagccaacctgctgcaacagcacgccaaacacatcctggtgatccagtgctttcgccgcgtcatccacaatgacgtcaaagccaaaggtttcggcgcgagtacgcacgacgtccagagtttgcggatggacatcagaggcgacaaagaaccggttggcatttttcagtttgctgacgcgctttgccatcgccatcgcttcagcggcggcggtcgcttcatccagcagcgaggcggaagccatgtccagccccgtcaggtccagcgtcacctgttggaagttgagcagcgcttccagacgcccctgagagacttccggttgatacggggtataagcggtgtaccagcctggattttccagcatgttgcgcaggataaccggcggtagctgcacggcggtgtagcccatgccaatgtacgacgtgaagcgcttgttacgcccggcgatggcttttaattccgccagtgcggcatattcggttgccgcctcgccaacctgcggcggagtcgcgagctgaatgtctttcggcacaatctgacctgtcagcgcgtttaacgactcggcgccaaccgcattcagcatctcttgttgctgtgcggcgtccggtccgatgtggcgttcaatgaaagcgccgcggttttcaagctggcttaacgtctgtgtcatgggcgatggttcctgaaacgtgcagtgaatcgtgattgtctctaactcaattgcccggtggcgctgacgcttaccgggcctacgcgtgcgaaaacgaatacgcaaaatcattcgcgttgcagtgagtaggccggataagcattagcgccatccggcacaacattattcgtcttctaacaatgcctcatacgcggtggcatccagcagcgattcaagttcgctttcatcgctggctttgattttaaagatccagccaccggcatacggttcgctgttcaccagctccggggagtcgctcagcgcatcgtttaccgccacgatctcgccgcttaccggcgcataaatgtcggacgccgcttttacggactccgccacggcgcagtcgtcgcccgcgcttacggtcgcgccgacttccggcagatcaacaaaaaccatatcgcccaacagctcctgagcgtgttcagtaatgccaacagtgtaagtgccatccgcttctttacgcagccattcgtgttctttgctgtatttcagttctgcgggtacgttgctcatcaattaatctccaaaaaaggatgaatcacgcgacggctttgccgttacgcacaaaaacaggtttagtcacttttaccggcatttcacggttacgaatttgtacaatcgccgtctcgccgatgcccgccggaacacgcgccagcgcaatgctgtagcccaacgttggggaaaacgtcccgctggtgataatgccttcttgctgattgccctgcgcatcggtaaaacgcaccggcagttcattacgcaatacgcctttctcggtcatcaccagaccgacaagctgctcatggcctttttcacgctgcatctccagcgcctcacggccaataaagtcgcggtcagcaggttcccaggcgatagtccatcccatattagccgccagcggagagataccttcatccatctcctgaccgtacaggttcatgccagcttccagacgcagcgtgtcgcgcgcgccaagaccgcacggcttcacgcccgcctccaccagcgcacgccagaaatccgccgctttttcattcggcatggcgatttcatagcccgcttcgccggtataaccggtggtggcgataaacagatcgcccacctgaacgccgaagaacggcttcataccttctactgcatggcgctgttcgtcagtaaacagagtcgccgctttttcctgcgcattcggcccctgtaccgcaatcagcgacaggtcgtcacgaacggtaatgtcgatggcataaggttcagcgtgttgggtaatccaggagaggtctttttcgcgggtggcggagttaacaacgagacggaagaaatcttcagtgaagtagtagatgataaggtcatcaatcacgccgcccgatgcgttaagcataccggagtagagggctttacccgtcttcgttagcttcgcgacgtcgttggccagcagataacgtagaaactctcgtgtgcggctgccatgaagatcgacaatggtcatatgcgatacatcaaacatcccggcatcggtgcgcacagcgtggtgttcatcaagctgagagccgtaatgcaggggcatcatccagccatgaaaatcgaccatgcgggcgccgcatagcgtgtgttgttcgtacaaaggcgtctgttgggccatcttttcctcgttgaattagcgggggctaacaaccattttcatgggaaatcttcgccacgaaacctggcatcgacgccctttttcctgcgccgacgcaaacgttctcttgctcctgaacttaccaccgaaccaggcgctaaaccataaggctgaatttaccatcacattagcttatgactaaaaaacgccaaaaccccatcagcacaaaaaaccactattacgctaaataacctccataaaaatgaagctgatacgatttatcacaacataaattaatattaaatgcggaaaaaatgtcgaaaatcgcgttcgccaaaaatagtgtcattagaaaatataatgcgaaataagcggtgaaattagattatttcaaacgaggaaagccccccggcgcgatagccgggaaagcaaagtgtgacgggtttcaaactcttgctggcgtgcagtcagacgcttaacgaagccattgcggaaggtcgtttagccccattgcctggcgaagcagttggggtttgacgccggggagcgtatccgccagtttcagcccgatgtcgcgcagcaatttttttgccgggttttcgccggcaaacaggtcacgaaaaccttgcatcccggcaagcatcatcgccgcgctatgtttacggctacgctcataacgacggagataaagatgttggccaatgtctttgccctggcgctgaagccggcgcagatcgtccaccagttcggccgcgtccataaagccgaggttgacgccctgccctgccagcggatggatggtgtgcgcggcatcgccgaccaacgccagacgatgcgcggcaaactggcgagcatagcggcccgtcagcggaaaaacctgccgttcgctttccaggcggcataagcccagccgattatcgaaggcgatagtcaacgcctggttaaacgcctcgtcgccgctctgttgcatacgctccgcatcctgcggagaaagcgaccagacaatggaacacagatgcggatcgcttaacggcaaaaacgccagaataccttcaccatgaaacacctggcgagcaaccgcgccgtgcggctcttcggtgcggatagtcgctaccagcgcatggtgacggtagtcccagaaagttaagggaatatccgctttgttacgcagccaggagttggcgccatccgcggcaatcaccagacgcgcggttaacatcgcgccgtcttttaaagtcaggaaggcgtcgttctccccccaggcgacctgctgtaactccgctggcgccattaaggtgatatccgccgcttgctgcgctttttgccacaatgcgtagtgaatgacgctgttttcaacaatatgccccagatggctatatcccatgcttgcgtcatcaaacgtaatacggccaaagctgtctttatcccagacttccataccgtggtagcaacttgcccgtcgcgccacaatgtttgaccatacgccaagacgggtaagcagtttttcgctggcggcattaatcgccgacacccgaagctgaggcgacgcatcgttcgccaacggctgggggacaacgtgatccagtaccgcaacgcgcaaaccgctcccctgcaagccgcaggcgacagccagtcccaccatgcctccgccaactattgctacatcaacactttgcactatttactcctggaaaccggaacaatcaaaaccgtaggccggataaggcgaagctgccatccggtatttttacgaacacgatgccggatggcggcgtaaatgccttatccggcctacagatcggcttaacgcgcaacccaacctaaggtccgctgtgccagcgcatcgcgcgcaggcggtaataattccatcgccattaaaccgatattgcgcccaataaccagcggcgcccaacgatttgcaaacagatggaccagaccgttcgttacgccaatcgtcgtatcccggtcaacctgacgacgctgctgatagcgcgataacacgtgccaggcgccaatatcctcgcccgcgtcctgtgccgcgatcagcgtttccgccaggctcatgacatcgcgcagaccgagattaaacccttgtccggcgataggatgcaacgtctgcgccgcattgccgaccatgacagtccggtgagtaaacacttttgccgccgtagtcagggcaagcggatacacgctgcgcttaccggcctgagtaattcgccccagccgccagccgaacgcggcctgcaatgcatggcagaactgcgcgtcggaccagctcagcacctcatcgcgctggtcgagtgggtgacaccaaaccagcgaacatcggccatgcgacatcggcaacatcgccagcgggccattgggagtaaaacgttcaaaggcgcgtccctgatgcgggatagcggtcgcgacattcgctatcaccgctaactgttcgtaaggctcctgatgccagtcaacgccgcaggctgacgccagcgcagagtgggtaccgttagccgccaccagcacgctgccagctatcacattgccgttttccagagtgacgttaacttgctgttgggtacgcgacacgctggctacgcgctccgggcagtgcagcgtaacgcctggcgctttacgcaagagcgcaaacagacgcagcccgatatcatgcagctccgcaacgtgacccaacgctgccaggctgtaatcctgcgcgtcgagagtcacaaatccgacatgaccgcgatcgctgacgtgtacggtgttgattgccgttgcgcaatcggaaatcgcctgccagacgccaattcgcgccagttgctggcaagtgcccgccgccagcgcaatcgctctggcgtcaaagccgggatgaccgtcggcttcaggcgctttcgcttcaatcaggtgtaccggcaacgtcccatgactgaactgagagatggccagcgccagcgttgcgcctgccatgccgccgccaacgataatgacgctcattgctgccgcgccgccgccattaatgcctcaatgtcatccgccttcttcacaacgccagcggtcaggttttcattaccggtttcggtaatgacaatgtcatcttcaattcgaacgccaatgccgcgatacgcttccggcacgtcggcatccggcgcgatatagaggcctggctctacggtcagcaccatgcccggctccaggatgcgggagcgatccggcccataaacgccgacatcatgaacatccagccccagccagtggctcaagccatgcataaagaaaggacgatgcgcattctcggcaatcagttgatcaacctctccttgcaaaatccccaacttcaccagcccggttatcatgatgcgcacgacttcgccggtcacctgctgaatagaggtaccaggacggaacagtcgcaggctggtctccagcgattccagaacgatgtcataaatttcacgctgagctggcgtaaatttcccgttcaccgggaaagtacgcgtgatgtcgcccgcgtaacctttatattcacaacccgcgtcgataagcactaaatcgccgtcgcgcatttcactttcgttttcagtgtaatgcaggatacagccattttcgccgctgccgacaatggtgttataggagggatagcgcgcgccatggcgattaaattcgtggtgaatttcaccctccagctgatactcaaacatccccggacggcatttttccatcgcgcggatatgcgccagagcgctaatttccccggcgcggcgcatgaccgcaatctcttccggcgatttgaacaggcgcatctcatggacgatcggtcgccagtcagtcatggtggccggcgcggtcagattctggcgggagcctttacgcagcttccccagcgcagccagaacaatctcgtcggcatacgcatattcgccctgcgcgtggtacaccacatccagaccattaagcaactgaaagagttgctggttgatttcgctaaacgccagcgcccggtcaacgcccagtttttccggtgcggcatcctgtcctaaacggcgaccaaaccagatttccgcagtcaggtcgcgaacgcggttgaacaaaacgctgtggttgtgggtgtcatcactcttaatcagtaccagcacggcttccggttcgttaaaaccggtgaaataccagaagtcgctactctggcgatacggatattcactgtctgcgctgcgcgtcgcctccggcgcggcaaagatcagcgcggcgctgccgggctgcatttgcgccagtaatgcctggcgacggcgttggtattcctgctgagtcatgacatggcctccatttcgttttttcttagtgtagcgtcggtttacgcacttccggcgcggtcggctgttggcgcgtgaaagtgtcatgacataacagcgccgcaacacggacatattcgatgatctcttcgagcgacatctccagctcttcctgatcttcgctctcatcataaccaagctgcgcaatattacgcaggtcgtcaatcgcttcacccgtttcgccggtgactttatcaagtttaggctgcgttacgccgaggccaagcaaaaagtggttaacccacccggctaaggcatctgcgcgatcgaatacgctgacatcgtcgccttcaggcagataaagctgaaaaagaaagccgtcgtcttccagcgcgtcgctggtcgccgcgtgcattttgcgcagcgcctgagcaagctcatgcccgaaggccagaccttcgttcgtcaggtcgtgcagcagcggctgccatgagctgtcgttgttgccgccgcaaatcatcccgctgattaaaccatgcatttcagccggggtcagaccggccccttgttgattcaaaaaccggttcatttcgttgtaaccaggcatttcgttctgtatagacataagcattcgtcatcaaagggaggatattcatgatatgctaccactttggaccctggtgaaccagaaaagggcttgtatcttcacaccagggtagctatagtgtcgccccttcgcggaccctgggtctggagacgaaggcagcgcagtcaatcagcaggaaggtggcatgtctgcacaacccgtcgatatccaaatatttggccgttcactgcgagtgaattgcccgcctgaccaaagggatgcgttgaatcaggctgcggacgatctgaatcagcggttgcaagatctgaaagttcgcactagagtcacaaatactgagcagttggttttcattgccgcattgaatatcagctatgagttaactcaggaaaaagcgaagacccgcgattacgcggcgagcatggaacaacgtattcggatgctacaacagaccatcgaacaggcgttgcttgatcaaggtcgcataaccgaaaaaacgggccaaaactttgaataacacttttcgctttactatggtaaagtgattgtgaaaacagaatttctctgagatgtttgcaagcgggccagtcccctgagccgatatttcataccacaagaatgtggcgctccgcggttggtgagcatgctcggttcgtccgagaagccttaaaactgtgacgacacattcaccttgaaccaagggttcaagggttacagcctgcggcggcatctcggagattccccttctgactggcgacagccatgacgcaacttcccgaactctctttatcacgacaagaaatccgccgaatgattcggcaacgtcgtcgtgcgctgacgccagagcagcaacgccgctttggtcaacaggccgccgcccgaatgctcagctttcctcccgtcgtgatggcgcacactgtcgccgtgtttctctcctttgatggcgaactcgacacccagccgctgattgaacagctatggcgagcaggcaagcgcgtctaccttccggttcttcatcccttcagccctggcaacctcctgttcctgcactatcatccgcagagtgcgctggtgaccaaccgcttaaagatccgggagccacggcttgatgtccgcgacgtattgccgctggcaaagctggatgtgctggtaacgccattagtggcgtttgacgaaggcgggcagcgcctggggatgggcggcggattttatgaccgtacgttgcaaaactggcagcagcataagatccagcccgtgggctacgcgcatgattgccagttagtagaaaaactgccagttgaagagtgggatatcccgctgcctgcggtggtgacgccgtccaaaatttgggagtggtagccgtgttttgtcgattgacagcgtcgcttttttgacctaaatttctcggtgaagggtgagggaggcgaacctccctcctgcgtactctctgttaatatgctggcgtagcgatgattaacaggatcagcagcatgatgacgtatctcatcatcgtccctttcctttttagagcccctgcttcgccaggggctttcccgtttcagcgctatgctgagcccttatcgtaaattccttttattgctgtacaacacgcaacgctgcctttaattaccaattgcggcaaggctcgaaaacagaatgtatgcgttacacgaagagatgttgaggcagggaaaccagagaaaggatgggcaggtcatctcctgcccatttagaggaaattagtacagcagacgggcgcgaatggtacctggaatcgccttcatcgccagcagcgctttctccgccacatcgccatcggcttctatatcaattaccacataccccattcgggcggaggtttgcagatactgcgcggcaatgttaacgccctgctcggcaaaaatctggttaagcgcggtcaatacgcctgggcggttttcgtggatgtgcatcaagcgacgaccgccgtgcagcggcagcgacacttccgggaagttcacggcggacagcgtcgagccgttatccgagtacttaatcagttttcctgcgacttccagaccgatgttttcttgcgcctcctgcgtcgagccgccgatatgcggcgtcaggatcacgttatcgaattcgcacagcggagaggtaaacggatcgctattagtggccggttccgtcgggaagacgtcgatagccgcccccgccagatgtttcgtcgccagcgcgtcgcacaaagccgggatatctaccaccgtaccgcgcgcggcgttaatcagcagcgaacccggcttcatcagggcaatctcttttgcgcccatcatgtttttggtggaggcgttttcaggtacgtgcagactgaccacatcgctcatattcagcaattcagacaggtgctgcacctgagttgcgttaccgagcggcagtttattttcaatatcatagaaatagacatgcatccccagcgattccgccagaatgcccaactgcgttcctatatggccgtaaccgataatgccaagctttttaccgcgcgcttcgaacgatcccgccgccagtttattccatacgccgcggtgcgctttggcgttcgcttccggcacgccgcgcagcagcagcaacagctcgccaatcaccagctccgccacggaacgggtattcgagaatggcgcgttaaagaccggaataccgcgttttgccgccgcatttaaatccacctggttggtgccgatgcaaaaacagccaatcgccaccagcttctctgcggcgttaatcacttcttctgtcagatgagtacgggatcgcagaccgatgaagtgggcatcgcggatggacgctttcaactgttcagcgtccagcgcgcccttgtgatattcaatgttggtgtaacctgccgcacgaaggctttccagcgccttttgatgcaccccttcaaccagcagaaatttaattttatctttctccagcgatacctttgccatttccccgatcctgtctttttttgccatctgatgttgtgtgtggatttgcatccgtccttcaacatatcaaaaaaaattatcacggcaatatgaacgtttgcgccagcgtcgtgaaggaatcgcatacagcgggaaatagcagatgaaaataccgggaataactttttctttggagggatcggcagggcaaacgattaaacgtgatacatgtcaccaaatttgccctgaccgaattttttacgcggcaggaaatacgcctggcgcgatcattttacgatggttttcaccccgtccggcgtgccgatcagtgcgacatcggcgccacggttggcgaacagccccacggtcacgacgcccggaatcgcgttaatggcgttttccagcgcgatgggatcaaggatttccataccataaacatccagaatcacgttgccgttatccgtgaccacgttctgacggtactccggacgcccgcccagcttcaccagttgacgagcgaccgcgctgcgcgccatcggaatcacttcgaccggcaacgggaatttgccaagaatatccacctgcttagaggcatccgcaatacagataaatttctccgccacggaagcaataattttctcacgggttaatgccgcgccgccgcctttgatcatctgcatatgaccgttgatttcgtccgcgccatcgacatagatacccaggctatccacttcgttgagatcaaacacgtgaataccgaggcctttgagtttttcagtcgaggcgtccgagctggagaccgcgccttcaatctggcctttcattgtgcccagcgcatcaataaagtgtgcggccgttgagcctgtaccaacgcccacaatggtgccgggctgtacatactgaagtgccgcccatcctaccgcttttttcagttcatcctgcgtcatagatcgtttcgcctgtggtgtgaaaatacagccgcattatagaacattgtcgggaaaaatctccgtgtccgtacacaggctacggatttcatctgtaccgacggcaaatttatgtcatagtgcggaaaaaaataacaggagcatgacacaacaatgaaacgtccggactacagaacactacaggcgctggatgccgttatacgtgaacgagggttcgagcgcgccgcccagaagctgtgcatcacgcaatccgccgtctcacagcgcataaaacagcttgagaatatgttcggacaacctttattggtgcgtaccgttcctcctcgccctacggagcaagggcaaaaattactggctctgctgcgtcaggttgaactgctggaagaagagtggctgggcgatgaacaaaccggctctacaccgctgctgctgtcgctggcggttaacgccgatagtctggcgacctggctgcttccggcgctggcgccggtgctggcggactcccctatccgtctcaatttacaggtggaagatgaaacgcgcacgcaagaacgtctgcggcgcggcgaggtggtgggcgcggtgagtattcagcatcaggcgctgcccagttgcctggtagacaaactgggcgcgctcgactatctgtttgtcgcgtcaaggccgtttgccgagcgctatttccccaatggcgttacccggtcgtcgctgctgaaagcgcccgccgtcgcgttcgaccatctggatgatatgcatcaggcctttttgcaacagaatttcgatctaccgcccggcagcgtgccgtgccatatcgttaattcatccgaagcatttgtacagcttgcgcgtcagggcacgacctgctgcatgatccctcacctgcagattgagaaagagctggaaagcggcgagttgatcaacttaacgcctggtttgctgcagcgccggatgctttactggcaccgctttgccccggaaagccggatgatgcgcaaagtgaccgacgcgctgctggagtacgggcacaaggtgctgcgtcaggattagcctctctatgaatgccggatggcggcgtgaacgtcttatccggcctgcatgacccattattccctcgtcacttctttgaagttcatcacaaaatcattgcgttcaggcggcaaaaaacgacgcgccattggctattttttgctggcgacaaggcgattcaaaacgctcaccgtattagcaaatcttcatttcaatgcgtaatacggagcaaaaaacgcgaacaccgggagaaaatgcggcctggaagcgcccaggccgggcgagattactgcgtgctggcggccgtggtcgacgtctgccctgttccaggttcaagctggaataccacatcgacctgatcgtcgaactgaatggtcggctgctcgtaagtttcctgcgcggataccggcgcagcatctgcggctttcatcattcgcaccaccggactcggctgataattagagacatggtaacgaacgctgtaaaccggccccaatttgctgttaaaaccggctgccagcgcttgcgcctgatgaatcgcgtcatcaatggcggctttgcgggctttgtctttataggcgtccggttgcgccacgcccagcgataccgaacgaatctcgttcagacccgccttcagcgcgccgtccagcagcgaattgagtttatctaactgacgcagcgtcacctcaacggttcgcaccgcgcgataccctttcagaatgcttttaccgttttggtaatcataatccggctgcgtgcgcagattcgccgcgctaatgtcttttttcgcaatctgattttgctcaaggaaggaaagatattgcgccacgcgctcatcggcctgcttcttcgccgtcgccgcgtccttcgccgcgacgttcacttcaatcgctaaggtggcgatatcaggcacagcatcgacgcttgccgtaccggaagtcacgatgtgcgggccttccggcaattcgcttgcctgcgccgacattgcacttaaacccactaatgccgccagggccatcactttgaacttcacagtctctcctccatattgcagtcattgccctgatatacagggcgcatgcaggcaagcttagcggatatcggcctgttgtccatcagacaacgcttagttgaaaagcgcgtgcatatgcgcgacgccttcccgcgccagttggaaggcgataagccacatcaccacccctaccagaatgttgataatgcgttgagctttcgccgtacgcagtcgaggcgcaagccaggccgccagtagcgctaacccaaaaaaccacaagaacgacgcgctaatcgtgccgagagcaaaccagcgctttggctccatagccagttgtccgccgagactgcccaacacgacaaacgtatccagataaacgtgcggattcagccacgttaccgccagcatcgtagcaataattttccagcgcccctgcttcataacctcggcgctggccagctccagattactgctcattgccgttttcagcgcgcctaaaccgtaccataacaagaacgcaaccccgccccatgtgaccagcgccagcagccacggcgactgcatcagcaacgcgctaccgccaaaaataccggcgctaatcaggactaaatcacttaacgcgcaaagcagcgctatcatgaggtggtactggcgacggattccctgattcatcacaaacgcattttgcgggccaagcggaaggatcatggcggcgccaagggcaaacccttgaaaataataagatatcacgttaactaccctgagctgtttttcttaaaggcagactatagcgcgggaatattattagcggaaattgataattttaatcactaataagaaaagctaatgaagagactgaataacggatggcggctacgcttatccgctcaataaccagagaatactggaggcggataaacgcagcactggcaggcagcacgggaggaaaattactccgcggcgttatctttcacgcgtttaaaattgacgtccatctgcgggtacgggaagctaataccagcggcgtcgaattcacgtttaatacgttccagcacgtcccagtagacattttgcaggtcgctgcttttactccagacacgcaccacaaaattaattgatgaggcgcccagctcattcaaacgcaccgtcatttcgcgatcttttaaaatacgatcgtcggactcgataatcgtcgtgagcagctgtttcacctgatcgatatccgaatcgtaggccaccccaataatgaattcgttgcggcgaaccggctcacgagaatagttgatgatatttcccgcgataattttgccattcggaatcacaataattttgccgtctaccgcgcgcattgtcgtggaaaagatttgcacgttaagtaccgtaccggcaacgccgcctaaatcgacatactcaccggcgcggaacggacggaacataaccagcaataccccagccgcaaggttagaaagcgatccctgtaatgccaggccaacggctaaaccagcggcgcccagtacggcaataaccgaggcggtttgaacccccacgcgacccagagccgcaatcagcgtaaaagcgataaccccatagcgcaccagcgcagaaagaaagtcggccactgtcgcatcaatatgacgcgcacgcatcagacgatttaccgtattggaaatcacgcgcgctacaatcaagccgatgatgataatagcgatagccgcaacaatattcacagcatagctgagcaataacgcctggttgcgtaccagccaggtgcccgcaccatttatgctgtcgacaacattcaaatcttccattcaatattccttggtcatagcaaaacaagcaaatgagatcattctcacgaaaagaactttttaaaggtaaacaaaaacagaggaatatgccatttttcggcatcatcccaaaaccaaaaaaggcaggtacattgtgagttggccggatgaaagcgctaactaacgccgctctccggaaataacgataaaaaaatggcttcccaagggaagccatttcaatcagcagactatattacagaacgtcaatcgcgttcagttctttaaatgctttttccagacgagcgatcatcgaagtctggccagcacgcagccatacgcgcgggtcatagtatttcttgttcggctgatcttcgcctttcgggttgcccagctgaccttgcagatacgcttcgttttctttgtagtagttcagaacaccttcccaggttgcccattgggtatcggtatcgatgttcattttcactacgccgtagcttacggagtctttgatttcctgagcagtagaaccggaaccgccgtggaaaacgaagttcaggctgttgtgcggcaggttgtgtttcttagaaacatagtcctgagaatcacgcagaatggtcggggtcagaaccacgttacccggcttgtaaacgccgtgtacgttaccgaaggaagcggcaatggtgaaacgcgggctgattttgctcagttcagtgtacgcgtaatcaacgtcttccggctgggtgtacagagcagaagcgtccatgtggctgttgtccacgccgtcttcttcaccaccggtgcaacccagttcgatttccagagtcatgccaattttggacatgcgcgccaggtatttggagcagatttcgatgttttcgtgcagagactcttcagacaggtcaatcatgtgagaagagaacagcggtttaccggtagccgcgaagtgtttttcacccgcgtccagcagaccgtcgatccacggcagcagtttcttcgcgcagtggtcagtgtgcaggataaccggcacgccgtagtgttcagccatctggtgaacgtgatgcgcgccagagatagcgcccaggattgccgcgccctgaggtacgtcagttttcacgcctttacccgcgatgaaggacgcgccgccgttggagaactgaacgatgaccggtgctttaacttttgcagcggtttccagaacagcgttgatggaatcagtgcccacgcagttaactgccggcagagcaaaattgttttcttttgctacctggaacactttctgtacgtcatcaccagtgatcacgcctggttttacgaaatcaaaaattttagacatgtttcgttgtcctgtatcgtcgggctttgggaaaaaacacgggccgccctgaatgtcagatcggcgataaatcaacgggcaggaatccctgcccgtaacgattacttcttagcgcgctcttcgagcatcgctacggctggcagaactttaccttccacgaattcgaggaatgcgccgccgccagtagaaatgtaggaaattttgtcagcaatgccgaacaggtcgattgccgccagggtgtcgccgccgccagcgatggaaaacgcttcgctatcagcgatggcattcgccacgatttcagtccctttacggaagttcgggaactcaaacacgccaaccgggccgttccacagaatggttttggcattcttgaggatttcagccagctgctgagcggaagcatcgccgatatccaggatctgctcgtcttctttcacgtcgttaacggatttcagagtcgccggtgcggtttcggagaactcggtggcaacgcgaacatcggtcggaaccgggatatcgcaagtggtcagcagacgttttgcttcgtcaaccaggtcagcttcgtacagggatttaccgacgctgtggccctgagcggcaacgaaggtgttggcgataccgccgccgacaatcagctggtcagcgattttagacagggaatccagaacggtcagtttggtagatactttagaaccaccaacgatagccaccatcggacgagccggttctttcagcgctttacccagcgcatccagttcagcggccagcagcgggcctgcgcacgcaacatcagcaaatttgccgataccgtgggtagaagcctgcgcgcggtgcgcagtaccaaaggcgtccatcacgaatacgtcacacagggcggcgtattttttagacagcgcttcgtcgtctttcttttcgcctttgttaaagcgaacgttttccagaaccaccagctcaccttcggccacgtcaacgccgtccaggtaatctttgaccaggcgaaccgggttagacagtttgtctttcaggtagttaacaaccggcagcagagagaattcttcgttgtactcgccttcggtaggacgacccaggtgggaagttaccatcactttcgcgccctgtttcagagccagttcgatggtcggcagagaggcgcggatacgcgcgtcgctggtcactttcccttctttaacaggtacgttcagatccgcacggataaaaacgcgtttcccggccagatccagatcggtcatcttaattacagacatggtgaatcctctcaatgatgcttaaagttttgtcgacgctgacgcgtcgagcctgaaaccaactgcggccatcgctaacgtggtgtcgagcatccggttagcaaagccccattcattatcgcaccagaccagcgtcttgatcaggtgggcgccactaacccgggtttgcgtgccatcaacaatggcgctgtgcgggtcgtggttaaaatctatcgagaccaacggtgattccgtatagtcaactataccatgaaatgcaccttgtgctgctttttgcagcaactggttgacttcactggcttttactggttttttcaccgttacgcttaaatcgatcgccgtcacattaatggttggaacgcgcacggcaatcgcctcaaaacggtcgttaaactgcgggaatatacgcgtaatgcctgccgccagttttgtatctaccgggataatcgactggctggccgcgcgcgtgcgccgcagatcggagtgatacgcgtcgatcacctgctgatcgttcatcgcggagtggatcgtcgtgacggtaccagactcgatgccgtaagcatcatccaacaatttaatgacgggaattatgcaattcgtggtacaggatgcgtttgagacaatacgatgttccgcacgcagttcattctggttcacgccaaaaacgacggtggcgtcaagatcgttgctgcccggatgagaaaagagcactttcttcgcgccagcggcaatatgcgcctcgccatgctcccggttgccatatacgcccgtacaatccaacacgacatccacgcccagttcgcgccacggcagatccgccagcgttcgttcatgcagaatacgaatgacgtcgtcgccgacaaaaagctgctcgcgctcgtggcgaacctcccatgcaaaacgcccgtggctggtatcgtatttcaacaaatgcgccatgcctgcggcatccgccagctcgttgatggccaccacggtaatttccgcgcgacgtccggattcatacaaagcacgaaccacgttacgtccgatgcgaccaaagccattaatcgctatgcgtacggtcataggtctcctgcaaggctatcccgattcagatgaggctgacagagtaatgcagctcatcgtcgagtaaaacctcacctgtcgcaaactgcgactgattggttaattgtcgaacatttaattaactgaaacgcttcagctagaataagcgaaacggggaataaaaggaatgtttgtccagtcgaagaagacagttatctgacctgcatcacatttcatggccgcttacgctgcaatttattccatatttaagaatcaccagtacatccgtcagatcttttcatcgtcgcgtcacaaatactgatttatatcagaaagcgctgtcgccagcgtctatattatcagcgccacgtccgagtctcggagtcctgtaacgatgactgtatctcaccacaatgcctctacagcgcgcttttacgcgcttcgtctgcttcccggccaggaagtgttttcccaattacacgcctttgtgcaacagaaccaattacatgccgcctggattgcagggtgtaccggcagtctgaccgacgttgcgctgcgttatgccgggcaagaagcgaccacatcgctcaccggcacgtttgaagttatctcgctaaacggcacgcttgaattgaccggcgagcatctgcatctcgcggtatcggatccctacggggccatgctcggcggccatatgatgccagggtgtaccgtgcgtaccacgctggaactggttatcggcgagctgccagcgctgacgttcagccgtcaaccgtgcgccatttccggttatgacgaactgcatatttcttcccgttaattgacgactctttaagaggtactttatggcgcgtcgcccgttttccagccagtctctggtgctgattgtcatcgctattgccatcaatatgattggcggacagcttattagcatgttgaagctgcctatttttctcgactcgatcggcaccttaattagcgcggtactgttagggccgttcatcggcatgttgactgggcttctgaccaacttgctgtgggggctgcttaccgaccctatcgctgccgcgtttgccccggtagcgatggttatcggtctggtcgccgggtggctggcgcgcgcaggctggtttcgtaccctgcccaaagtgatcgtcagcggggtcgtcattacgttggcggtgacgctggtcgccgtaccgcttcgtaccgcgctttttggcggcgttaccggtagcggcgctgatttgttcgtcgcctggatgcattcaatgggccaaaacctggtggagtcagtcgcgattaccgtcataggcgctaatctggtcgataaaattctgacggcgatcatcgtttgggtgctgctgcgtcagctaccgttacgtacgacacggcattttcctgcgatgtcagccgtacgctaaatgcatccgtttacctcgttaaccttatgggcgttggcggcctgcaccacgctgctactccctgcgcagaccgtgctcccggtttatagcgcggcggccttcctctgtctgctggcgctgaaatcaacgcggcggcgggcgaagtatgtcgcctggctgatgctgtctttagggtttgggctatggctggtacatggcggttggctaacggaatggataagcgggcagccttgcgatccgcagcgctggatatatgccgttacgctatggctacgcctgctggcgatcgtgtcgacgtcgcagctatggatgcagtatgtgccggttcagcggtttattcgcgccctgttcgcttcacgtttgccgcccggcatcgcttacctgttcgctggcccgctgctggtcgtcgaacagctcaaacgacaactgacgatcgttcatgaagcccagcgcgcgcgtggcgtaccgctagatgaaggctggtatcagcggctacgggcaatgcctgcgctgatcgtgccgcttacgcaaaatgcgcttaacgatctgacaatacgcggcgcggcgttggatatgcgggggtttcggctgcatcgagcccgaaccacgctgtgggcgccgaaagatagcatgttacaacgggttgcgcggtatggcatggtactgctaatactggcggaagcgggagtgtggatatggttacgttagagcagtttcgttatcttccgtccgatgcgacacgcccgccggcatgttttgatttccactattcaacacccggaatagtggcgatagtcggcgataacggcagcggaaaaagtacgctggcgcaactgatggctggctggtatccggattatcttcccggtgatattgacggcacaggcttactgcttggcgtccctatcgggcagctcccgctggtagaacagtcgcccaccatccagttggtgcagcaatcgccttatttacagctttccggctgtacctttagcgtagaggaagaggtggcgtttggcccggagaatctcggcctccatgaagcggaaattctacggcgcattgacgaggcgctgactctgacaaactgccagtcgttacgccatcgccatcccggcacgctctccggcggcgaaacgcagcgggtagtgattgccagcgcgcttgccatgcagcccaggctattagttcttgatgaagccttcagtcggctgacgtcagcggccaccgggatgctgctggaacggctacaacagtgggcgctggaacgtcattctctcattgtgctttttgagcgtaaccattttccttttctgacgcgatgccagcgggtatggcaattgcgcgacggagcgctaaccccattatgttgacgttaaatcaggtcgcttatcgctggccggatgccgcagccgactgtttgcacgctatctcgcttgaacttcgtgacggcgaatggctggcgttgaccggcgataacggcgcgggaaaatcaacactgttacggattatggccggcctgctttcccccacttccggctcggtaacgcttaatggagagccgattgcgcagcttaaaa
